(19) United States
(12) Patent Application Publication
(10) Pub. No.: US 2018/0213800 A1
(43) Pub. Date: Aug. 2, 2018

(54) PENICILLIUM ENDOPHYTE COMPOSITIONS AND METHODS FOR IMPROVED AGRONOMIC TRAITS IN PLANTS

(71) Applicant: INDIGO AG, INC., Boston, MA (US)

(72) Inventors: Slavica DJONOVIC, Malden, MA (US); Elizabeth Alexa MCKENZIE, Milton, MA (US); Gerardo V. TOLEDO, Belmont, MA (US); Craig SADOWSKI, Somerville, MA (US); Geoffrey VON MALTZAHN, Boston, MA (US); Karen V. AMBROSE, Cambridge, MA (US); Xuecheng ZHANG, Newton, MA (US); David Morris JOHNSTON, Cambridge, MA (US); Trudi A. GULICK, Topsfield, MA (US)

(73) Assignee: INDIGO AG, INC., Boston, MA (US)

(21) Appl. No.: 15/739,063

(22) PCT Filed: Jun. 24, 2016
(86) PCT No.: PCT/US2016/039191

§ 371 Date: Dec. 21, 2017

Related U.S. Application Data
(60) Provisional application No. 62/185,471, filed on Jun. 26, 2015.
(60) Provisional application No. 62/185,429, filed on Jun. 26, 2015.

(51) Int. Cl. A01N 63/04; C12N 15/82

(52) U.S. Cl. CPC A01N 63/04; C12N 15/8226; C12N 15/8227; C12N 15/8225

(57) ABSTRACT

This invention relates to methods and compositions for providing a benefit to a plant by associating the plant with a beneficial endophyte of the genus Penicillium, including benefits to a plant derived from a seed or other plant element treated with said endophyte. For example, this invention provides purified endophytes, synthetic combinations comprising endophytes, and methods of making and using the same. In particular, this invention relates to compositions and methods of improving soybean and maize plants.

### CROSS REFERENCE TO RELATED APPLICATIONS

[0001] This application claims the benefit of U.S. Provisional Application No. 62/185,471 filed 26 Jun. 2015, and of U.S. Provisional Application No. 62/185,429 filed on 26 Jun. 2015, all of which are hereby incorporated by reference in their entireties.

### SEQUENCE LISTING

[0002] The instant application includes a Sequence Listing which has been submitted via EFS-Web and is hereby incorporated by reference in its entirety. Said ASCII copy, created on Jun. 24, 2016, is named 33898PCT_sequencelisting.txt, and is 2.20 MB in size.

### FIELD OF THE INVENTION

[0003] This invention relates to compositions and methods for improving the cultivation of plants, particularly agricultural plants, such as soybeans and maize. For example, this invention describes bacteria, such as strains of the genus Penicillium, that are capable of living in a plant, which may be used to impart improved agronomic traits to plants. The disclosed invention also describes methods of improving plant characteristics by introducing bacteria to those plants. Further, this invention also provides methods of treating seeds and other plant elements with bacteria that are capable of living within a plant, to impart improved agronomic characteristics to plants, particularly agricultural plants, for example soybeans and maize.

### BACKGROUND OF THE INVENTION

[0004] According the United Nations Food and Agricultural Organization (UN FAO), the world's population will exceed 9.6 billion people by the year 2050, which will require significant improvements in agricultural to meet growing food demands. At the same time, conservation of resources (such as water, land), reduction of inputs (such as fertilizer, pesticides, herbicides), environmental sustainability, and climate change are increasingly important factors in how food is grown. There is a need for improved agricultural plants and farming practices that will enable the need for a nearly doubled food production with fewer resources, more environmentally sustainable inputs, and with plants with improved responses to various biotic and abiotic stresses (such as pests, drought, disease).

[0005] Today, crop performance is optimized primarily via technologies directed towards the interplay between crop genotype (e.g., plant breeding, genetically-modified (GM) crops) and its surrounding environment (e.g., fertilizer, synthetic herbicides, pesticides). While these paradigms have assisted in doubling global food production in the past fifty years, yield growth rates have stalled in many major crops and shifts in the climate have been linked to production instability and declines in important crops, driving an urgent need for novel solutions to crop yield improvement. In addition to their long development and regulatory timelines, public fears of GM-crops and synthetic chemicals have challenged their use in many key crops and countries, resulting in a lack of acceptance for many GM traits and the exclusion of GM crops and many synthetic chemistries from some global markets. Thus, there is a significant need for innovative, effective, environmentally-sustainable, and publically-acceptable approaches to improving the yield and resilience of crops to stresses.

[0006] Improvement of crop resilience to biotic and abiotic stresses has proven challenging for conventional genetic and chemical paradigms for crop improvement. This challenge is in part due to the complex, network-level changes that arise during exposure to these stresses.

[0007] Like humans, who utilize a complement of beneficial microbial symbionts, plants have been purported to derive a benefit from the vast array of bacteria and fungi that live both within and around their tissues in order to support the plant's health and growth. Endophytes are symbiotic organisms (typically bacteria or fungi) that live within plants, and inhabit various plant tissues, often colonizing the intercellular spaces of host leaves, stems, flowers, fruits, seeds, or roots. To date, a small number of symbiotic endophyte-host relationships have been analyzed in limited studies to provide fitness benefits to model host plants within controlled laboratory settings, such as enhancement of biomass production (i.e., yield) and nutrition, increased tolerance to stress such as drought and pests. There is still a need to develop better plant-endophyte systems to confer benefits to a variety of agriculturally-important plants such as soybean and maize, for example to provide improved yield and tolerance to the environmental stresses present in many agricultural situations for such agricultural plants.

[0008] Thus, there is a need for compositions and methods of providing agricultural plants with improved yield and tolerance to various biotic and abiotic stresses. Provided herein are novel compositions including bacteria that are capable of living within a plant, formulations comprising these compositions for treatment of plants and plant elements, and methods of use for the same, created based on the analysis of the key properties that enhance the utility and commercialization of an endophyte composition.

### SUMMARY OF THE INVENTION

[0009] In an aspect, the invention provides a method for preparing a plant reproductive element composition, comprising contacting the surface of a plant reproductive element of a plant with a formulation comprising a purified microbial population that comprises a Penicillium endophyte that is heterologous to the plant reproductive element, and comprises at least 500 nucleotides at least 95% identical to a nucleic acid sequence selected from the group consisting of: SEQ ID NO:1, SEQ ID NO: 2, SEQ ID NO: 4, SEQ ID NO:5, wherein the endophyte is present in the formulation in an amount capable of modulating at least one of: trait of agronomic importance, transcription of a gene, level of a transcript, the expression of a protein, level of a hormone, level of a metabolite, and population of endogenous microbes; in plants grown from said plant reproductive elements, as compared to isoline plants grown from plant reproductive elements not contacted with said formulation.

[0010] In an aspect, the invention provides a method for preparing a plant reproductive element composition, comprising contacting the surface of a plant reproductive element of a plant with a formulation comprising a purified microbial population that comprises a Penicillium endophyte that is heterologous to the plant reproductive element, and comprises at least 100 nucleotides at least 95% identical to SEQ ID NO: 3, wherein the endophyte is present in the formulation in an amount capable of modulating at least one of: trait of agronomic importance, transcription of a gene, level of a transcript, the expression of a protein, level of a hormone, level of a metabolite, and population of endogenous microbes; in plants grown from said plant reproductive elements, as compared to isoline plants grown from plant reproductive elements not contacted with said formulation.

[0011] In an aspect, the invention provides a method for preparing a plant reproductive element composition, comprising contacting the surface of a plant reproductive element of a plant with a formulation comprising a purified microbial population that comprises a Penicillium endophyte that is heterologous to the plant reproductive element, and comprises a Deposit selected from the group consisting of: ______ Deposit ID ______, ______ Deposit ID ______, ______ Deposit ID ______, ______ Deposit ID ______, or IDAC Deposit ID 081111-01, wherein the endophyte is present in the formulation in an amount capable of modulating at least one of: trait of agronomic importance, transcription of a gene, level of a transcript, the expression of a protein, level of a hormone, level of a metabolite, and population of endogenous microbes; in plants grown from said plant reproductive elements, as compared to isoline plants grown from plant reproductive elements not contacted with said formulation.

[0012] In an aspect, the invention provides a method for preparing a plant reproductive element composition, comprising contacting the surface of a plant reproductive element of a plant with a formulation comprising a purified microbial population that comprises a Penicillium endophyte that is heterologous to the plant reproductive element, and comprises a Penicillium species selected from the group consisting of: SMCD2206, chrysogenum, olsonii, griseofulvum, or janthinellum, wherein the endophyte is present in the formulation in an amount capable of modulating at least one of: trait of agronomic importance, transcription of a gene, level of a transcript, the expression of a protein, level of a hormone, level of a metabolite, and population of endogenous microbes; in plants grown from said plant reproductive elements, as compared to isoline plants grown from plant reproductive elements not contacted with said formulation. In certain embodiments of any of the preceding methods, the plant optionally comprises in at least one of its plant elements the Penicillium endophyte. In certain embodiments, the progeny of a plant of any of the preceding methods optionally comprises in at least one of its plant elements the Penicillium endophyte. In certain embodiments, the Penicillium endophyte is optionally present in the plant reproductive element in an amount capable of providing a benefit to a plant derived from the plant reproductive element, as compared to a plant derived from a plant reproductive element not treated with the Penicillium endophyte.

[0013] In an aspect, the invention provides a method of modulating a trait of agronomic importance in a plant derived from a plant reproductive element, comprising treating the plant reproductive element with a formulation comprising a Penicillium endophyte that comprises at least 500 nucleotides at least 95% identical to a nucleic acid sequence selected from the group consisting of: SEQ ID NO:1, SEQ ID NO: 2, SEQ ID NO: 4, SEQ ID NO:5.

[0014] In an aspect, the invention provides a method of modulating a trait of agronomic importance in a plant derived from a plant reproductive element, comprising treating the plant reproductive element with a formulation comprising a Penicillium endophyte that comprises at least 100 nucleotides at least 95% identical to SEQ ID NO: 3.

[0015] In an aspect, the invention provides a method of modulating a trait of agronomic importance in a plant derived from a plant reproductive element, comprising treating the plant reproductive element with a formulation comprising a Penicillium endophyte that comprises modulated production of auxin.

[0016] In an aspect, the invention provides a method of modulating a trait of agronomic importance in a plant derived from a plant reproductive element, comprising treating the plant reproductive element with a formulation comprising a Penicillium endophyte that comprises modulated production of acetoin.

[0017] In an aspect, the invention provides a method of modulating a trait of agronomic importance in a plant derived from a plant reproductive element, comprising treating the plant reproductive element with a formulation comprising a Penicillium endophyte that comprises modulated production of a siderophore.

[0018] In an aspect, the invention provides a method of modulating a trait of agronomic importance in a plant derived from a plant reproductive element, comprising treating the plant reproductive element with a formulation comprising a Penicillium endophyte that comprises utilization of a primary carbon source selected from the group consisting of: L-Arabinose, L-Proline, D-Xylose, L-Glutamic acid, D-Ribose, L-Asparagine, Sucrose, Tween 80, Adonitol, L-Alanine, L-Alanyl-Glycine, L-Galactonic-acid-γ-lactone, β-Methyl-D-glucoside, m-Inositol, D-Galactose, D-Trehalose, D-Glucuronic acid, D-Gluconic acid, D-Mannitol, D-L-Malic acid, α-D-Glucose, Maltose, D-Melibiose, Maltotriose, Pyruvic acid, D-Galacturonic acid, D-Mannose, L-Threonine, Inosine, L-Lyxose, D-Alanine, L-Lactic acid, D-Galactonic acid-γ-lactone, Uridine, α-Hydroxy Glutaric acid-γ-lactone, D-L-α-Glycerol phosphate.

[0019] In an aspect, the invention provides a method of modulating a trait of agronomic importance in a plant derived from a plant reproductive element, comprising treating the plant reproductive element with a formulation comprising a Penicillium endophyte that comprises secretion at least one protein listed in Table 4C with at least a 2× higher rate, as compared to the strain represented by SEQ ID NO:6.

[0020] In an aspect, the invention provides a method of modulating a trait of agronomic importance in a plant derived from a plant reproductive element, comprising treating the plant reproductive element with a formulation comprising a Penicillium endophyte that comprises secretion of at least one protein selected listed in Table 4D with at least a 0.8× lower rate, as compared to the strain represented by SEQ ID NO: 6.

[0021] In an aspect, the invention provides a method of modulating a trait of agronomic importance in a plant derived from a plant reproductive element, comprising treating the plant reproductive element with a formulation comprising a Penicillium endophyte that comprises secretion of at least one protein selected from Table 4A.

[0022] In an aspect, the invention provides a method of modulating a trait of agronomic importance in a plant derived from a plant reproductive element, comprising treating the plant reproductive element with a formulation comprising a Penicillium endophyte that comprises no secretion of a protein selected from the proteins listed in Table 4B.

[0023] In an aspect, the invention provides a method of using a beneficial Penicillium endophyte that confers a trait of agronomic importance to a plant, said endophyte comprising at least 500 nucleotides at least 95% identical to a nucleic acid sequence selected from the group consisting of: SEQ ID NO:1, SEQ ID NO: 2, SEQ ID NO: 4, SEQ ID NO:5.

[0024] In an aspect, the invention provides a method of using a beneficial Penicillium endophyte that confers a trait of agronomic importance to a plant, said endophyte comprising at least 100 nucleotides at least 95% identical to SEQ ID NO: 3.

[0025] In an aspect, the invention provides a method of using a beneficial Penicillium endophyte that confers a trait of agronomic importance to a plant, said endophyte comprising modulated production of auxin.

[0026] In an aspect, the invention provides a method of using a beneficial Penicillium endophyte that confers a trait of agronomic importance to a plant, said endophyte comprising modulated production of acetoin.

[0027] In an aspect, the invention provides a method of using a beneficial Penicillium endophyte that confers a trait of agronomic importance to a plant, said endophyte comprising modulated production of a siderophore.

[0028] In an aspect, the invention provides a method of using a beneficial Penicillium endophyte that confers a trait of agronomic importance to a plant, said endophyte comprising utilization of a primary carbon source selected from the group consisting of: L-Arabinose, L-Proline, D-Xylose, L-Glutamic acid, D-Ribose, L-Asparagine, Sucrose, Tween 80, Adonitol, L-Alanine, L-Alanyl-Glycine, L-Galactonic-acid-γ-lactone, β-Methyl-D-glucoside, m-Inositol, D-Galactose, D-Trehalose, D-Glucuronic acid, D-Gluconic acid, D-Mannitol, D-L-Malic acid, α-D-Glucose, Maltose, D-Melibiose, Maltotriose, Pyruvic acid, D-Galacturonic acid, D-Mannose, L-Threonine, Inosine, L-Lyxose, D-Alanine, L-Lactic acid, D-Galactonic acid-γ-lactone, Uridine, α-Hydroxy Glutaric acid-γ-lactone, D-L-α-Glycerol phosphate.

[0029] In an aspect, the invention provides a method of using a beneficial Penicillium endophyte that confers a trait of agronomic importance to a plant, said endophyte comprising secretes at least one protein listed in Table 4C with at least a 2× higher rate, as compared to the strain represented by SEQ ID NO:6.

[0030] In an aspect, the invention provides a method of using a beneficial Penicillium endophyte that confers a trait of agronomic importance to a plant, said endophyte comprising secretes at least one protein selected listed in Table 4D with at least a 0.8× lower rate, as compared to the strain represented by SEQ ID NO: 6.

[0031] In an aspect, the invention provides a method of using a beneficial Penicillium endophyte that confers a trait of agronomic importance to a plant, said endophyte comprising secretes at least one protein selected from Table 4A.

[0032] In an aspect, the invention provides a method of using a beneficial Penicillium endophyte that confers a trait of agronomic importance to a plant, said endophyte comprising does not secrete a protein selected from the proteins listed in Table 4B.

[0033] In an aspect, the invention provides a method of modulating a trait of agronomic importance in a plant derived from a plant reproductive element under normal watering conditions, comprising treating said plant reproductive element with a formulation comprising a Penicillium endophyte that is heterologous to the plant reproductive element and comprises an ITS nucleic acid sequence that is at least 95% identical over at least 500 nucleotides to a nucleic acid sequence selected from SEQ ID NO:1 through SEQ ID NO:5, and modulating at least one characteristic of said plant as compared to an isoline plant not grown from reproductive elements treated with said Penicillium endophyte, said characteristic comprising modulation of expression of at least one gene involved in a pathway selected from the group consisting of: symbiosis enhancement, resistance to biotic stress, resistance to abiotic stress, growth promotion, cell wall composition, and developmental regulation.

[0034] In an aspect, the invention provides a method of modulating a trait of agronomic importance in a plant derived from a plant reproductive element under normal watering conditions, comprising treating said plant reproductive element with a formulation comprising a Penicillium endophyte that is heterologous to the plant reproductive element and comprises an ITS nucleic acid sequence that is at least 95% identical over at least 500 nucleotides to a nucleic acid sequence selected from SEQ ID NO:1 through SEQ ID NO:5, and modulating at least one characteristic of said plant as compared to an isoline plant not grown from reproductive elements treated with said Penicillium endophyte, said characteristic comprising modulation of at least one hormone involved in a pathway selected from the group consisting of: developmental regulation, seed maturation, dormancy, response to environmental stresses, stomatal closure, expression of stress-related genes, drought tolerance, defense responses, infection response, pathogen response, disease resistance, systemic acquired resistance, transcriptional reprogramming, mechanical support, protection against biotic stress, protection against abiotic stress, signaling, nodulation inhibition, endophyte colonization, fatty acid deoxygenation, wound healing, antimicrobial substance production, metabolite catabolism, cell proliferation, and abscission.

[0035] In an aspect, the invention provides a method of modulating a trait of agronomic importance in a plant derived from a plant reproductive element under normal watering conditions, comprising treating said plant reproductive element with a formulation comprising a Penicillium endophyte that is heterologous to the plant reproductive element and comprises an ITS nucleic acid sequence that is at least 95% identical over at least 500 nucleotides to a nucleic acid sequence selected from SEQ ID NO:1 through SEQ ID NO:5, and modulating at least one characteristic of said plant as compared to an isoline plant not grown from reproductive elements treated with said Penicillium endophyte, said characteristic comprising modulation of the level of expression of least one protein.

[0036] In an aspect, the invention provides a method of modulating a trait of agronomic importance in a plant derived from a plant reproductive element under normal watering conditions, comprising treating said plant reproductive element with a formulation comprising a Penicillium endophyte that is heterologous to the plant reproductive element and comprises an ITS nucleic acid sequence that is at least 95% identical over at least 500 nucleotides to a nucleic acid sequence selected from SEQ ID NO:1 through SEQ ID NO:5, and modulating at least one characteristic of said plant as compared to an isoline plant not grown from reproductive elements treated with said Penicillium endophyte, said characteristic comprising modulation of least one metabolite in at least one of the following plant metabolic pathways: alkaloid metabolism, phenylpropanoid metabolism, flavonoid biosynthesis, isoflavonoid biosynthesis, lipid metabolism, nitrogen metabolism, and carbohydrate metabolism.

[0037] In an aspect, the invention provides a method of modulating a trait of agronomic importance in a plant derived from a plant reproductive element under normal watering conditions, comprising treating said plant reproductive element with a formulation comprising a Penicillium endophyte that is heterologous to the plant reproductive element and comprises an ITS nucleic acid sequence that is at least 95% identical over at least 500 nucleotides to a nucleic acid sequence selected from SEQ ID NO:1 through SEQ ID NO:5, and modulating at least one characteristic of said plant as compared to an isoline plant not grown from reproductive elements treated with said Penicillium endophyte, said characteristic comprising modulation of at least one transcript involved in at least one of the following pathways: symbiosis enhancement, resistance to biotic stress, resistance to abiotic stress, growth promotion, cell wall composition, and developmental regulation.

[0038] In an aspect, the invention provides a method of modulating a trait of agronomic importance in a plant derived from a plant reproductive element under normal watering conditions, comprising treating said plant reproductive element with a formulation comprising a Penicillium endophyte that is heterologous to the plant reproductive element and comprises an ITS nucleic acid sequence that is at least 95% identical over at least 500 nucleotides to a nucleic acid sequence selected from SEQ ID NO:1 through SEQ ID NO:5, and modulating at least one characteristic of said plant as compared to an isoline plant not grown from reproductive elements treated with said Penicillium endophyte, said characteristic comprising upregulation of at least one gene in root tissue, selected from the upregulated genes listed in Table 7A.

[0039] In an aspect, the invention provides a method of modulating a trait of agronomic importance in a plant derived from a plant reproductive element under normal watering conditions, comprising treating said plant reproductive element with a formulation comprising a Penicillium endophyte that is heterologous to the plant reproductive element and comprises an ITS nucleic acid sequence that is at least 95% identical over at least 500 nucleotides to a nucleic acid sequence selected from SEQ ID NO:1 through SEQ ID NO:5, and modulating at least one characteristic of said plant as compared to an isoline plant not grown from reproductive elements treated with said Penicillium endophyte, said characteristic comprising upregulation of at least one gene in leaf tissue, selected from the upregulated genes listed in Table 7A.

[0040] In an aspect, the invention provides a method of modulating a trait of agronomic importance in a plant derived from a plant reproductive element under normal watering conditions, comprising treating said plant reproductive element with a formulation comprising a Penicillium endophyte that is heterologous to the plant reproductive element and comprises an ITS nucleic acid sequence that is at least 95% identical over at least 500 nucleotides to a nucleic acid sequence selected from SEQ ID NO:1 through SEQ ID NO:5, and modulating at least one characteristic of said plant as compared to an isoline plant not grown from reproductive elements treated with said Penicillium endophyte, said characteristic comprising upregulation of at least one gene in stem tissue, selected from the upregulated genes listed in Table 7A.

[0041] In an aspect, the invention provides a method of modulating a trait of agronomic importance in a plant derived from a plant reproductive element under normal watering conditions, comprising treating said plant reproductive element with a formulation comprising a Penicillium endophyte that is heterologous to the plant reproductive element and comprises an ITS nucleic acid sequence that is at least 95% identical over at least 500 nucleotides to a nucleic acid sequence selected from SEQ ID NO:1 through SEQ ID NO:5, and modulating at least one characteristic of said plant as compared to an isoline plant not grown from reproductive elements treated with said Penicillium endophyte, said characteristic comprising downregulation of at least one gene in root tissue, selected from the downregulated genes listed in Table 7A.

[0042] In an aspect, the invention provides a method of modulating a trait of agronomic importance in a plant derived from a plant reproductive element under normal watering conditions, comprising treating said plant reproductive element with a formulation comprising a Penicillium endophyte that is heterologous to the plant reproductive element and comprises an ITS nucleic acid sequence that is at least 95% identical over at least 500 nucleotides to a nucleic acid sequence selected from SEQ ID NO:1 through SEQ ID NO:5, and modulating at least one characteristic of said plant as compared to an isoline plant not grown from reproductive elements treated with said Penicillium endophyte, said characteristic comprising downregulation of at least one gene in leaf tissue, selected from the downregulated genes listed in Table 7A.

[0043] In an aspect, the invention provides a method of modulating a trait of agronomic importance in a plant derived from a plant reproductive element under normal watering conditions, comprising treating said plant reproductive element with a formulation comprising a Penicillium endophyte that is heterologous to the plant reproductive element and comprises an ITS nucleic acid sequence that is at least 95% identical over at least 500 nucleotides to a nucleic acid sequence selected from SEQ ID NO:1 through SEQ ID NO:5, and modulating at least one characteristic of said plant as compared to an isoline plant not grown from reproductive elements treated with said Penicillium endophyte, said characteristic comprising downregulation of at least one gene in stem tissue, selected from the downregulated genes listed in Table 7A.

[0044] In an aspect, the invention provides a method of modulating a trait of agronomic importance in a plant derived from a plant reproductive element under normal watering conditions, comprising treating said plant reproductive element with a formulation comprising a Penicillium endophyte that is heterologous to the plant reproductive element and comprises an ITS nucleic acid sequence that is at least 95% identical over at least 500 nucleotides to a nucleic acid sequence selected from SEQ ID NO:1 through SEQ ID NO:5, and modulating at least one characteristic of said plant as compared to an isoline plant not grown from reproductive elements treated with said Penicillium endophyte, said characteristic comprising an increase in hormone level in root tissue, selected from the group consisting of: SA, CA, OPEA.

[0045] In an aspect, the invention provides a method of modulating a trait of agronomic importance in a plant derived from a plant reproductive element under normal watering conditions, comprising treating said plant reproductive element with a formulation comprising a Penicillium endophyte that is heterologous to the plant reproductive element and comprises an ITS nucleic acid sequence that is at least 95% identical over at least 500 nucleotides to a nucleic acid sequence selected from SEQ ID NO:1 through SEQ ID NO:5, and modulating at least one characteristic of said plant as compared to an isoline plant not grown from reproductive elements treated with said Penicillium endophyte, said characteristic comprising a decrease in hormone level in root tissue, selected from the group consisting of: ABA, JA, JA-ILE, OPDA, TA.

[0046] In an aspect, the invention provides a method of modulating a trait of agronomic importance in a plant derived from a plant reproductive element under normal watering conditions, comprising treating said plant reproductive element with a formulation comprising a Penicillium endophyte that is heterologous to the plant reproductive element and comprises an ITS nucleic acid sequence that is at least 95% identical over at least 500 nucleotides to a nucleic acid sequence selected from SEQ ID NO:1 through SEQ ID NO:5, and modulating at least one characteristic of said plant as compared to an isoline plant not grown from reproductive elements treated with said Penicillium endophyte, said characteristic comprising an increase in hormone level in stem tissue, selected from the group consisting of: ABA, CA.

[0047] In an aspect, the invention provides a method of modulating a trait of agronomic importance in a plant derived from a plant reproductive element under normal watering conditions, comprising treating said plant reproductive element with a formulation comprising a Penicillium endophyte that is heterologous to the plant reproductive element and comprises an ITS nucleic acid sequence that is at least 95% identical over at least 500 nucleotides to a nucleic acid sequence selected from SEQ ID NO:1 through SEQ ID NO:5, and modulating at least one characteristic of said plant as compared to an isoline plant not grown from reproductive elements treated with said Penicillium endophyte, said characteristic comprising a decrease in hormone level in stem tissue, selected from the group consisting of: SA, JA, JA-ILE, OPDA, OPEA, TA.

[0048] In an aspect, the invention provides a method of modulating a trait of agronomic importance in a plant derived from a plant reproductive element under normal watering conditions, comprising treating said plant reproductive element with a formulation comprising a Penicillium endophyte that is heterologous to the plant reproductive element and comprises an ITS nucleic acid sequence that is at least 95% identical over at least 500 nucleotides to a nucleic acid sequence selected from SEQ ID NO:1 through SEQ ID NO:5, and modulating at least one characteristic of said plant as compared to an isoline plant not grown from reproductive elements treated with said Penicillium endophyte, said characteristic comprising an increase in hormone level in leaf tissue, selected from the group consisting of: JA, JA-ILE, OPEA.

[0049] In an aspect, the invention provides a method of modulating a trait of agronomic importance in a plant derived from a plant reproductive element under normal watering conditions, comprising treating said plant reproductive element with a formulation comprising a Penicillium endophyte that is heterologous to the plant reproductive element and comprises an ITS nucleic acid sequence that is at least 95% identical over at least 500 nucleotides to a nucleic acid sequence selected from SEQ ID NO:1 through SEQ ID NO:5, and modulating at least one characteristic of said plant as compared to an isoline plant not grown from reproductive elements treated with said Penicillium endophyte, said characteristic comprising a decrease in hormone level in leaf tissue, selected from the group consisting of: ABA, SA, CA, OPDA, TA.

[0050] In an aspect, the invention provides a method of modulating a trait of agronomic importance in a plant derived from a plant reproductive element under normal watering conditions, comprising treating said plant reproductive element with a formulation comprising a Penicillium endophyte that is heterologous to the plant reproductive element and comprises an ITS nucleic acid sequence that is at least 95% identical over at least 500 nucleotides to a nucleic acid sequence selected from SEQ ID NO:1 through SEQ ID NO:5, and modulating at least one characteristic of said plant as compared to an isoline plant not grown from reproductive elements treated with said Penicillium endophyte, said characteristic comprising an increase in metabolite level in root tissue, selected from an increased metabolite in root tissue listed in Table 10.

[0051] In an aspect, the invention provides a method of modulating a trait of agronomic importance in a plant derived from a plant reproductive element under normal watering conditions, comprising treating said plant reproductive element with a formulation comprising a Penicillium endophyte that is heterologous to the plant reproductive element and comprises an ITS nucleic acid sequence that is at least 95% identical over at least 500 nucleotides to a nucleic acid sequence selected from SEQ ID NO:1 through SEQ ID NO:5, and modulating at least one characteristic of said plant as compared to an isoline plant not grown from reproductive elements treated with said Penicillium endophyte, said characteristic comprising a decrease in metabolite level in root tissue, selected from a decreased metabolite in root tissue listed in Table 10.

[0052] In an aspect, the invention provides a method of modulating a trait of agronomic importance in a plant derived from a plant reproductive element under normal watering conditions, comprising treating said plant reproductive element with a formulation comprising a Penicillium endophyte that is heterologous to the plant reproductive element and comprises an ITS nucleic acid sequence that is at least 95% identical over at least 500 nucleotides to a nucleic acid sequence selected from SEQ ID NO:1 through SEQ ID NO:5, and modulating at least one characteristic of said plant as compared to an isoline plant not grown from reproductive elements treated with said Penicillium endophyte, said characteristic comprising an increase in metabolite level in stem tissue, selected from an increased metabolite in stem tissue listed in Table 10.

[0053] In an aspect, the invention provides a method of modulating a trait of agronomic importance in a plant derived from a plant reproductive element under normal watering conditions, comprising treating said plant reproductive element with a formulation comprising a Penicillium endophyte that is heterologous to the plant reproductive element and comprises an ITS nucleic acid sequence that is at least 95% identical over at least 500 nucleotides to a nucleic acid sequence selected from SEQ ID NO:1 through SEQ ID NO:5, and modulating at least one characteristic of said plant as compared to an isoline plant not grown from reproductive elements treated with said Penicillium endophyte, said characteristic comprising a decrease in metabolite level in stem tissue, selected from a decreased metabolite in stem tissue listed in Table 10.

[0054] In an aspect, the invention provides a method of modulating a trait of agronomic importance in a plant derived from a plant reproductive element under normal watering conditions, comprising treating said plant reproductive element with a formulation comprising a Penicillium endophyte that is heterologous to the plant reproductive element and comprises an ITS nucleic acid sequence that is at least 95% identical over at least 500 nucleotides to a nucleic acid sequence selected from SEQ ID NO:1 through SEQ ID NO:5, and modulating at least one characteristic of said plant as compared to an isoline plant not grown from reproductive elements treated with said Penicillium endophyte, said characteristic comprising an increase in metabolite level in leaf tissue, selected from an increased metabolite in leaf tissue listed in Table 10.

[0055] In an aspect, the invention provides a method of modulating a trait of agronomic importance in a plant derived from a plant reproductive element under normal watering conditions, comprising treating said plant reproductive element with a formulation comprising a Penicillium endophyte that is heterologous to the plant reproductive element and comprises an ITS nucleic acid sequence that is at least 95% identical over at least 500 nucleotides to a nucleic acid sequence selected from SEQ ID NO:1 through SEQ ID NO:5, and modulating at least one characteristic of said plant as compared to an isoline plant not grown from reproductive elements treated with said Penicillium endophyte, said characteristic comprising a decrease in metabolite level in leaf tissue, selected from a decreased metabolite in leaf tissue listed in Table 10.

[0056] In an aspect, the invention provides a method of modulating a trait of agronomic importance in a plant derived from a plant reproductive element under normal watering conditions, comprising treating said plant reproductive element with a formulation comprising a Penicillium endophyte that is heterologous to the plant reproductive element and comprises an ITS nucleic acid sequence that is at least 95% identical over at least 500 nucleotides to a nucleic acid sequence selected from SEQ ID NO:1 through SEQ ID NO:5, and modulating at least one characteristic of said plant as compared to an isoline plant not grown from reproductive elements treated with said Penicillium endophyte, said characteristic comprising an increase in the level of at least one protein, selected from the increased expressed proteins listed in Table 8.

[0057] In an aspect, the invention provides a method of modulating a trait of agronomic importance in a plant derived from a plant reproductive element under normal watering conditions, comprising treating said plant reproductive element with a formulation comprising a Penicillium endophyte that is heterologous to the plant reproductive element and comprises an ITS nucleic acid sequence that is at least 95% identical over at least 500 nucleotides to a nucleic acid sequence selected from SEQ ID NO:1 through SEQ ID NO:5, and modulating at least one characteristic of said plant as compared to an isoline plant not grown from reproductive elements treated with said Penicillium endophyte, said characteristic comprising decrease in the level of at least one protein, selected from the decreased expression proteins listed in Table 8.

[0058] In an aspect, the invention provides a method of modulating a trait of agronomic importance in a plant derived from a plant reproductive element under water-limited conditions, comprising associating said plant reproductive element with a formulation comprising a Penicillium endophyte that is heterologous to the plant reproductive element and comprises an ITS nucleic acid sequence that is at least 95% identical to a nucleic acid sequence selected from SEQ ID NO:2 through SEQ ID NO:18, and modulating at least one characteristic of said plant as compared to an isoline plant not grown from a reproductive element treated with said Penicillium endophyte, said characteristic comprising modulation of transcription of at least one gene involved in at least one of the following pathways: symbiosis enhancement, resistance to biotic stress, resistance to abiotic stress, growth promotion, cell wall composition, and developmental regulation.

[0059] In an aspect, the invention provides a method of modulating a trait of agronomic importance in a plant derived from a plant reproductive element under water-limited conditions, comprising associating said plant reproductive element with a formulation comprising a Penicillium endophyte that is heterologous to the plant reproductive element and comprises an ITS nucleic acid sequence that is at least 95% identical to a nucleic acid sequence selected from SEQ ID NO:2 through SEQ ID NO:18, and modulating at least one characteristic of said plant as compared to an isoline plant not grown from a reproductive element treated with said Penicillium endophyte, said characteristic comprising modulation of transcription of at least one transcript involved in at least one of the following pathways: symbiosis enhancement, resistance to biotic stress, resistance to abiotic stress, growth promotion, cell wall composition, and developmental regulation.

[0060] In an aspect, the invention provides a method of modulating a trait of agronomic importance in a plant derived from a plant reproductive element under water-limited conditions, comprising associating said plant reproductive element with a formulation comprising a Penicillium endophyte that is heterologous to the plant reproductive element and comprises an ITS nucleic acid sequence that is at least 95% identical to a nucleic acid sequence selected from SEQ ID NO:2 through SEQ ID NO:18, and modulating at least one characteristic of said plant as compared to an isoline plant not grown from a reproductive element treated with said Penicillium endophyte, said characteristic comprising modulation of levels of at least one hormone involved in a pathway selected from the group consisting of: developmental regulation, seed maturation, dormancy, response to environmental stresses, stomatal closure, expression of stress-related genes, drought tolerance, defense responses, infection response, pathogen response, disease resistance, systemic acquired resistance, transcriptional reprogramming, mechanical support, protection against biotic stress, protection against abiotic stress, signaling, nodulation inhibition, endophyte colonization, fatty acid deoxygenation, wound healing, antimicrobial substance production, metabolite catabolism, cell proliferation, and abscission.

[0061] In an aspect, the invention provides a method of modulating a trait of agronomic importance in a plant derived from a plant reproductive element under water-limited conditions, comprising associating said plant reproductive element with a formulation comprising a Penicillium endophyte that is heterologous to the plant reproductive element and comprises an ITS nucleic acid sequence that is at least 95% identical to a nucleic acid sequence selected from SEQ ID NO:2 through SEQ ID NO:18, and modulating at least one characteristic of said plant as compared to an isoline plant not grown from a reproductive element treated with said Penicillium endophyte, said characteristic comprising modulation of at least one metabolite in at least one of the following plant metabolic pathways: alkaloid metabolism, phenylpropanoid metabolism, flavonoid biosynthesis, isoflavonoid biosynthesis, lipid metabolism, nitrogen metabolism, and carbohydrate metabolism.

[0062] In an aspect, the invention provides a method of modulating a trait of agronomic importance in a plant derived from a plant reproductive element under water-limited conditions, comprising associating said plant reproductive element with a formulation comprising a Penicillium endophyte that is heterologous to the plant reproductive element and comprises an ITS nucleic acid sequence that is at least 95% identical to a nucleic acid sequence selected from SEQ ID NO:2 through SEQ ID NO:18, and modulating at least one characteristic of said plant as compared to an isoline plant not grown from a reproductive element treated with said Penicillium endophyte, said characteristic comprising modulation of microbiome community profile.

[0063] In an aspect, the invention provides a method of modulating a trait of agronomic importance in a plant derived from a plant reproductive element under water-limited conditions, comprising associating said plant reproductive element with a formulation comprising a Penicillium endophyte that is heterologous to the plant reproductive element and comprises an ITS nucleic acid sequence that is at least 95% identical to a nucleic acid sequence selected from SEQ ID NO:1 through SEQ ID NO:5, and modulating at least one characteristic of said plant as compared to an isoline plant not grown from a reproductive element treated with said Penicillium endophyte, said characteristic comprising upregulation of at least one gene in root tissue, selected from the upregulated genes listed in Tables 7A, 7B, 7C, 7D, and 7E.

[0064] In an aspect, the invention provides a method of modulating a trait of agronomic importance in a plant derived from a plant reproductive element under water-limited conditions, comprising associating said plant reproductive element with a formulation comprising a Penicillium endophyte that is heterologous to the plant reproductive element and comprises an ITS nucleic acid sequence that is at least 95% identical to a nucleic acid sequence selected from SEQ ID NO:1 through SEQ ID NO:5, and modulating at least one characteristic of said plant as compared to an isoline plant not grown from a reproductive element treated with said Penicillium endophyte, said characteristic comprising upregulation of at least one gene in leaf tissue, selected from the upregulated genes listed in Tables 7A, 7B, 7C, 7D, and 7E.

[0065] In an aspect, the invention provides a method of modulating a trait of agronomic importance in a plant derived from a plant reproductive element under water-limited conditions, comprising associating said plant reproductive element with a formulation comprising a Penicillium endophyte that is heterologous to the plant reproductive element and comprises an ITS nucleic acid sequence that is at least 95% identical to a nucleic acid sequence selected from SEQ ID NO:1 through SEQ ID NO:5, and modulating at least one characteristic of said plant as compared to an isoline plant not grown from a reproductive element treated with said Penicillium endophyte, said characteristic comprising upregulation of at least one gene in stem tissue, selected from the upregulated genes listed in Tables 7A, 7B, 7C, 7D, and 7E.

[0066] In an aspect, the invention provides a method of modulating a trait of agronomic importance in a plant derived from a plant reproductive element under water-limited conditions, comprising associating said plant reproductive element with a formulation comprising a Penicillium endophyte that is heterologous to the plant reproductive element and comprises an ITS nucleic acid sequence that is at least 95% identical to a nucleic acid sequence selected from SEQ ID NO:1 through SEQ ID NO:5, and modulating at least one characteristic of said plant as compared to an isoline plant not grown from a reproductive element treated with said Penicillium endophyte, said characteristic comprising downregulation of at least one gene in root tissue, selected from the downregulated genes listed in Tables 7A, 7B, 7C, 7D, and 7E.

[0067] In an aspect, the invention provides a method of modulating a trait of agronomic importance in a plant derived from a plant reproductive element under water-limited conditions, comprising associating said plant reproductive element with a formulation comprising a Penicillium endophyte that is heterologous to the plant reproductive element and comprises an ITS nucleic acid sequence that is at least 95% identical to a nucleic acid sequence selected from SEQ ID NO:1 through SEQ ID NO:5, and modulating at least one characteristic of said plant as compared to an isoline plant not grown from a reproductive element treated with said Penicillium endophyte, said characteristic comprising downregulation of at least one gene in leaf tissue, selected from the downregulated genes listed in Tables 7A, 7B, 7C, 7D, and 7E.

[0068] In an aspect, the invention provides a method of modulating a trait of agronomic importance in a plant derived from a plant reproductive element under water-limited conditions, comprising associating said plant reproductive element with a formulation comprising a Penicillium endophyte that is heterologous to the plant reproductive element and comprises an ITS nucleic acid sequence that is at least 95% identical to a nucleic acid sequence selected from SEQ ID NO:1 through SEQ ID NO:5, and modulating at least one characteristic of said plant as compared to an isoline plant not grown from a reproductive element treated with said Penicillium endophyte, said characteristic comprising downregulation of at least one gene in stem tissue, selected from the downregulated genes listed in Tables 7A, 7B, 7C, 7D, and 7E.

[0069] In an aspect, the invention provides a method of modulating a trait of agronomic importance in a plant derived from a plant reproductive element under water-limited conditions, comprising associating said plant reproductive element with a formulation comprising a Penicillium endophyte that is heterologous to the plant reproductive element and comprises an ITS nucleic acid sequence that is at least 95% identical to a nucleic acid sequence selected from SEQ ID NO:1 through SEQ ID NO:5, and modulating at least one characteristic of said plant as compared to an isoline plant not grown from a reproductive element treated with said Penicillium endophyte, said characteristic comprising upregulation of at least one transcript in root tissue, selected from the upregulated transcripts listed in Table 7F.

[0070] In an aspect, the invention provides a method of modulating a trait of agronomic importance in a plant derived from a plant reproductive element under water-limited conditions, comprising associating said plant reproductive element with a formulation comprising a Penicillium endophyte that is heterologous to the plant reproductive element and comprises an ITS nucleic acid sequence that is at least 95% identical to a nucleic acid sequence selected from SEQ ID NO:1 through SEQ ID NO:5, and modulating at least one characteristic of said plant as compared to an isoline plant not grown from a reproductive element treated with said Penicillium endophyte, said characteristic comprising upregulation of at least one transcript in leaf tissue, selected from the upregulated transcripts listed in Table 7F.

[0071] In an aspect, the invention provides a method of modulating a trait of agronomic importance in a plant derived from a plant reproductive element under water-limited conditions, comprising associating said plant reproductive element with a formulation comprising a Penicillium endophyte that is heterologous to the plant reproductive element and comprises an ITS nucleic acid sequence that is at least 95% identical to a nucleic acid sequence selected from SEQ ID NO:1 through SEQ ID NO:5, and modulating at least one characteristic of said plant as compared to an isoline plant not grown from a reproductive element treated with said Penicillium endophyte, said characteristic comprising upregulation of at least one transcript in stem tissue, selected from the upregulated transcripts listed in Table 7F.

[0072] In an aspect, the invention provides a method of modulating a trait of agronomic importance in a plant derived from a plant reproductive element under water-limited conditions, comprising associating said plant reproductive element with a formulation comprising a Penicillium endophyte that is heterologous to the plant reproductive element and comprises an ITS nucleic acid sequence that is at least 95% identical to a nucleic acid sequence selected from SEQ ID NO:1 through SEQ ID NO:5, and modulating at least one characteristic of said plant as compared to an isoline plant not grown from a reproductive element treated with said Penicillium endophyte, said characteristic comprising downregulation of at least one transcript in root tissue, selected from the downregulated transcripts listed in Table 7F.

[0073] In an aspect, the invention provides a method of modulating a trait of agronomic importance in a plant derived from a plant reproductive element under water-limited conditions, comprising associating said plant reproductive element with a formulation comprising a Penicillium endophyte that is heterologous to the plant reproductive element and comprises an ITS nucleic acid sequence that is at least 95% identical to a nucleic acid sequence selected from SEQ ID NO:1 through SEQ ID NO:5, and modulating at least one characteristic of said plant as compared to an isoline plant not grown from a reproductive element treated with said Penicillium endophyte, said characteristic comprising downregulation of at least one transcript in leaf tissue, selected from the downregulated transcripts listed in Table 7F.

[0074] In an aspect, the invention provides a method of modulating a trait of agronomic importance in a plant derived from a plant reproductive element under water-limited conditions, comprising associating said plant reproductive element with a formulation comprising a Penicillium endophyte that is heterologous to the plant reproductive element and comprises an ITS nucleic acid sequence that is at least 95% identical to a nucleic acid sequence selected from SEQ ID NO:1 through SEQ ID NO:5, and modulating at least one characteristic of said plant as compared to an isoline plant not grown from a reproductive element treated with said Penicillium endophyte, said characteristic comprising downregulation of at least one transcript in stem tissue, selected from the downregulated transcripts listed in Table 7F.

[0075] In an aspect, the invention provides a method of modulating a trait of agronomic importance in a plant derived from a plant reproductive element under water-limited conditions, comprising associating said plant reproductive element with a formulation comprising a Penicillium endophyte that is heterologous to the plant reproductive element and comprises an ITS nucleic acid sequence that is at least 95% identical to a nucleic acid sequence selected from SEQ ID NO:1 through SEQ ID NO:5, and modulating at least one characteristic of said plant as compared to an isoline plant not grown from a reproductive element treated with said Penicillium endophyte, said characteristic comprising an increase in hormone level in root tissue, selected from the group consisting of: JA, JAOILE, OPDA, OPEA, TA.

[0076] In an aspect, the invention provides a method of modulating a trait of agronomic importance in a plant derived from a plant reproductive element under water-limited conditions, comprising associating said plant reproductive element with a formulation comprising a Penicillium endophyte that is heterologous to the plant reproductive element and comprises an ITS nucleic acid sequence that is at least 95% identical to a nucleic acid sequence selected from SEQ ID NO:1 through SEQ ID NO:5, and modulating at least one characteristic of said plant as compared to an isoline plant not grown from a reproductive element treated with said Penicillium endophyte, said characteristic comprising a decrease in hormone level in root tissue, selected from the group consisting of: ABA, SA, CA.

[0077] In an aspect, the invention provides a method of modulating a trait of agronomic importance in a plant derived from a plant reproductive element under water-limited conditions, comprising associating said plant reproductive element with a formulation comprising a Penicillium endophyte that is heterologous to the plant reproductive element and comprises an ITS nucleic acid sequence that is at least 95% identical to a nucleic acid sequence selected from SEQ ID NO:1 through SEQ ID NO:5, and modulating at least one characteristic of said plant as compared to an isoline plant not grown from a reproductive element treated with said Penicillium endophyte, said characteristic comprising an increase in hormone level in stem tissue, selected from the group consisting of: SA, CA, JA-ILE, OPDA, OPEA.

[0078] In an aspect, the invention provides a method of modulating a trait of agronomic importance in a plant derived from a plant reproductive element under water-limited conditions, comprising associating said plant reproductive element with a formulation comprising a Penicillium endophyte that is heterologous to the plant reproductive element and comprises an ITS nucleic acid sequence that is at least 95% identical to a nucleic acid sequence selected from SEQ ID NO:1 through SEQ ID NO:5, and modulating at least one characteristic of said plant as compared to an isoline plant not grown from a reproductive element treated with said Penicillium endophyte, said characteristic comprising a decrease in hormone level in stem tissue, selected from the group consisting of: ABA, JA, TA.

[0079] In an aspect, the invention provides a method of modulating a trait of agronomic importance in a plant derived from a plant reproductive element under water-limited conditions, comprising associating said plant reproductive element with a formulation comprising a Penicillium endophyte that is heterologous to the plant reproductive element and comprises an ITS nucleic acid sequence that is at least 95% identical to a nucleic acid sequence selected from SEQ ID NO:1 through SEQ ID NO:5, and modulating at least one characteristic of said plant as compared to an isoline plant not grown from a reproductive element treated with said Penicillium endophyte, said characteristic comprising an increase in hormone level in leaf tissue, selected from the group consisting of: SA, CA, OPDA, TA.

[0080] In an aspect, the invention provides a method of modulating a trait of agronomic importance in a plant derived from a plant reproductive element under water-limited conditions, comprising associating said plant reproductive element with a formulation comprising a Penicillium endophyte that is heterologous to the plant reproductive element and comprises an ITS nucleic acid sequence that is at least 95% identical to a nucleic acid sequence selected from SEQ ID NO:1 through SEQ ID NO:5, and modulating at least one characteristic of said plant as compared to an isoline plant not grown from a reproductive element treated with said Penicillium endophyte, said characteristic comprising a decrease in hormone level in leaf tissue, selected from the group consisting of: ABA, JA, JA-ILE, OPEA.

[0081] In an aspect, the invention provides a method of modulating a trait of agronomic importance in a plant derived from a plant reproductive element under water-limited conditions, comprising associating said plant reproductive element with a formulation comprising a Penicillium endophyte that is heterologous to the plant reproductive element and comprises an ITS nucleic acid sequence that is at least 95% identical to a nucleic acid sequence selected from SEQ ID NO:1 through SEQ ID NO:5, and modulating at least one characteristic of said plant as compared to an isoline plant not grown from a reproductive element treated with said Penicillium endophyte, said characteristic comprising an increase in metabolite level in root tissue, selected from an increased metabolite in root tissue listed in Table 10.

[0082] In an aspect, the invention provides a method of modulating a trait of agronomic importance in a plant derived from a plant reproductive element under water-limited conditions, comprising associating said plant reproductive element with a formulation comprising a Penicillium endophyte that is heterologous to the plant reproductive element and comprises an ITS nucleic acid sequence that is at least 95% identical to a nucleic acid sequence selected from SEQ ID NO:1 through SEQ ID NO:5, and modulating at least one characteristic of said plant as compared to an isoline plant not grown from a reproductive element treated with said Penicillium endophyte, said characteristic comprising a decrease in metabolite level in root tissue, selected from a decreased metabolite in root tissue listed in Table 10.

[0083] In an aspect, the invention provides a method of modulating a trait of agronomic importance in a plant derived from a plant reproductive element under water-limited conditions, comprising associating said plant reproductive element with a formulation comprising a Penicillium endophyte that is heterologous to the plant reproductive element and comprises an ITS nucleic acid sequence that is at least 95% identical to a nucleic acid sequence selected from SEQ ID NO:1 through SEQ ID NO:5, and modulating at least one characteristic of said plant as compared to an isoline plant not grown from a reproductive element treated with said Penicillium endophyte, said characteristic comprising an increase in metabolite level in stem tissue, selected from an increased metabolite in stem tissue listed in Table 10.

[0084] In an aspect, the invention provides a method of modulating a trait of agronomic importance in a plant derived from a plant reproductive element under water-limited conditions, comprising associating said plant reproductive element with a formulation comprising a Penicillium endophyte that is heterologous to the plant reproductive element and comprises an ITS nucleic acid sequence that is at least 95% identical to a nucleic acid sequence selected from SEQ ID NO:1 through SEQ ID NO:5, and modulating at least one characteristic of said plant as compared to an isoline plant not grown from a reproductive element treated with said Penicillium endophyte, said characteristic comprising a decrease in metabolite level in stem tissue, selected from a decreased metabolite in stem tissue listed in Table 10.

[0085] In an aspect, the invention provides a method of modulating a trait of agronomic importance in a plant derived from a plant reproductive element under water-limited conditions, comprising associating said plant reproductive element with a formulation comprising a Penicillium endophyte that is heterologous to the plant reproductive element and comprises an ITS nucleic acid sequence that is at least 95% identical to a nucleic acid sequence selected from SEQ ID NO:1 through SEQ ID NO:5, and modulating at least one characteristic of said plant as compared to an isoline plant not grown from a reproductive element treated with said Penicillium endophyte, said characteristic comprising an increase in metabolite level in leaf tissue, selected from an increased metabolite in leaf tissue listed in Table 10.

[0086] In an aspect, the invention provides a method of modulating a trait of agronomic importance in a plant derived from a plant reproductive element under water-limited conditions, comprising associating said plant reproductive element with a formulation comprising a Penicillium endophyte that is heterologous to the plant reproductive element and comprises an ITS nucleic acid sequence that is at least 95% identical to a nucleic acid sequence selected from SEQ ID NO:1 through SEQ ID NO:5, and modulating at least one characteristic of said plant as compared to an isoline plant not grown from a reproductive element treated with said Penicillium endophyte, said characteristic comprising a decrease in metabolite level in leaf tissue, selected from a decreased metabolite in leaf tissue listed in Table 10.

[0087] In an aspect, the invention provides a method of modulating a trait of agronomic importance in a plant derived from a plant reproductive element under water-limited conditions, comprising associating said plant reproductive element with a formulation comprising a Penicillium endophyte that is heterologous to the plant reproductive element and comprises an ITS nucleic acid sequence that is at least 95% identical to a nucleic acid sequence selected from SEQ ID NO:1 through SEQ ID NO:5, and modulating at least one characteristic of said plant as compared to an isoline plant not grown from a reproductive element treated with said Penicillium endophyte, said characteristic comprising increase in abundance of microorganisms of the family Glomeraceae.

[0088] In an aspect, the invention provides a method of modulating a trait of agronomic importance in a plant derived from a plant reproductive element under water-limited conditions, comprising associating said plant reproductive element with a formulation comprising a Penicillium endophyte that is heterologous to the plant reproductive element and comprises an ITS nucleic acid sequence that is at least 95% identical to a nucleic acid sequence selected from SEQ ID NO:1 through SEQ ID NO:5, and modulating at least one characteristic of said plant as compared to an isoline plant not grown from a reproductive element treated with said Penicillium endophyte, said characteristic comprising increase in abundance of microorganisms of the genus Rhizophagus.

[0089] In an aspect, the invention provides a method of modulating a trait of agronomic importance in a plant derived from a plant reproductive element under water-limited conditions, comprising associating said plant reproductive element with a formulation comprising a Penicillium endophyte that is heterologous to the plant reproductive element and comprises an ITS nucleic acid sequence that is at least 95% identical to a nucleic acid sequence selected from SEQ ID NO:1 through SEQ ID NO:5, and modulating at least one characteristic of said plant as compared to an isoline plant not grown from a reproductive element treated with said Penicillium endophyte, said characteristic comprising an increase in abundance of microorganisms of the genus Glomus.

[0090] In an aspect, the invention provides a method of modulating a trait of agronomic importance in a plant derived from a plant reproductive element under water-limited conditions, comprising associating said plant reproductive element with a formulation comprising a Penicillium endophyte that is heterologous to the plant reproductive element and comprises an ITS nucleic acid sequence that is at least 95% identical to a nucleic acid sequence selected from SEQ ID NO:1 through SEQ ID NO:5, and modulating at least one characteristic of said plant as compared to an isoline plant not grown from a reproductive element treated with said Penicillium endophyte, said characteristic comprising a decrease in abundance of microorganisms of the family Enterobacteriaceae.

[0091] In an aspect, the invention provides a method of modulating a trait of agronomic importance in a plant derived from a plant reproductive element under water-limited conditions, comprising associating said plant reproductive element with a formulation comprising a Penicillium endophyte that is heterologous to the plant reproductive element and comprises an ITS nucleic acid sequence that is at least 95% identical to a nucleic acid sequence selected from SEQ ID NO:1 through SEQ ID NO:5, and modulating at least one characteristic of said plant as compared to an isoline plant not grown from a reproductive element treated with said Penicillium endophyte, said characteristic comprising a decrease in abundance of microorganisms of the genus Escherhia-Shigella.

[0092] In an aspect, the invention provides a method of modulating a trait of agronomic importance in a plant derived from a plant reproductive element under water-limited conditions, comprising associating said plant reproductive element with a formulation comprising a Penicillium endophyte that is heterologous to the plant reproductive element and comprises an ITS nucleic acid sequence that is at least 95% identical to a nucleic acid sequence selected from SEQ ID NO:1 through SEQ ID NO:5, and modulating at least one characteristic of said plant as compared to an isoline plant not grown from a reproductive element treated with said Penicillium endophyte, said characteristic comprising presence of at least one OTU described in Table 11A or Table 11B.

[0093] In an aspect, the invention provides a method of modulating a trait of agronomic importance in a plant derived from a plant reproductive element under water-limited conditions, comprising associating said plant reproductive element with a formulation comprising a Penicillium endophyte that is heterologous to the plant reproductive element and comprises an ITS nucleic acid sequence that is at least 95% identical to a nucleic acid sequence selected from SEQ ID NO:1 through SEQ ID NO:5, and modulating at least one characteristic of said plant as compared to an isoline plant not grown from a reproductive element treated with said Penicillium endophyte, said characteristic comprising an increase in presence of at least one OTU selected from Table 11C.

[0094] Certain embodiments of the invention are any of the preceding methods; wherein said trait of agronomic importance is selected from the group consisting of: disease resistance, drought tolerance, heat tolerance, cold tolerance, salinity tolerance, metal tolerance, herbicide tolerance, chemical tolerance, improved water use efficiency, improved nitrogen utilization, improved nitrogen fixation, pest resistance, herbivore resistance, pathogen resistance, increase in yield, increase in yield under water-limited conditions, health enhancement, vigor improvement, growth improvement, photosynthetic capability improvement, nutrition enhancement, altered protein content, altered oil content, increase in biomass, increase in shoot length, increase in root length, improved root architecture, increase in seed weight, altered seed carbohydrate composition, altered seed oil composition, increase in radical length, number of pods, delayed senescence, stay-green, altered seed protein composition, increase in dry weight of mature plant reproductive elements, increase in fresh weight of mature plant reproductive elements, increase in number of mature plant reproductive elements per plant, increase in chlorophyll content, increase in number of pods per plant, increase in length of pods per plant, reduced number of wilted leaves per plant, reduced number of severely wilted leaves per plant, increase in number of non-wilted leaves per plant, improved plant visual appearance.

[0095] In an aspect, the invention provides a method of altering the native microbiome community of a plant, comprising deriving said plant from a plant reproductive element treated with a formulation comprising a beneficial Penicillium endophyte. In an embodiment, the microbiome community alteration optionally comprises an increase in abundance of microorganisms of the family Glomeraceae. In an embodiment, the microbiome community alteration optionally comprises an increase in abundance of microorganisms of the genus Rhizophagus. In an embodiment, the microbiome community alteration optionally comprises an increase in abundance of microorganisms of the genus Glomus. In an embodiment, the microbiome community alteration optionally comprises a decrease in abundance of microorganisms of the family Enterobacteriaceae. In an embodiment, the microbiome community alteration optionally comprises a decrease in abundance of microorganisms of the genus Escherhia-Shigella. In an embodiment, the microbiome community alteration optionally comprises a presence of at least one OTU described in Table 11A or Table 11B. In an embodiment, the microbiome community alteration optionally comprises an increase in presence of at least one OTU selected from Table 11C.

[0096] Certain embodiments of the invention are any of the preceding methods, wherein the said plant is optionally soybean or maize. Certain embodiments of the invention are any of the preceding methods, wherein the formulation optionally comprises a purified population of the Penicillium endophyte at a concentration of at least about 10̂2 CFU/ml in a liquid formulation or about 10̂2 CFU/gm in a non-liquid formulation. Certain embodiments of the invention are any of the preceding methods, wherein the Penicillium endophyte is optionally capable auxin production, nitrogen fixation, production of an antimicrobial compound, mineral phosphate solubilization, siderophore production, cellulase production, chitinase production, xylanase production, or acetoin production. Certain embodiments of the invention are any of the preceding methods, wherein the Penicillium endophyte is optionally capable of localizing in a plant element of the plant, the plant element selected from the group consisting of: whole plant, seedling, meristematic tissue, ground tissue, vascular tissue, dermal tissue, seed, leaf, root, shoot, stem, flower, fruit, stolon, bulb, tuber, corm, keikis, and bud. In an embodiment, the plant element is optionally a seed, and wherein the Penicillium endophyte is present in at least two compartments of the seed, selected from the group consisting of: embryo, seed coat, endosperm, cotyledon, hypocotyl, and radicle.

[0097] Certain embodiments of the invention are any of the preceding methods, wherein said plant reproductive element is optionally a seed or optionally, a transgenic seed. Certain embodiments of the invention are any of the preceding methods, wherein the plant reproductive element is optionally placed into a substrate that promotes plant growth or wherein the substrate is optionally soil. In an embodiment, a plurality of the plant reproductive elements are optionally placed in the soil in rows, with substantially equal spacing between each within each row. Certain embodiments of the invention are any of the preceding methods, wherein the formulation optionally further comprises one or more of the following: a stabilizer, or a preservative, or a carrier, or a surfactant, or an anticomplex agent, or any combination thereof. Certain embodiments of the invention are any of the preceding methods, wherein the formulation optionally further comprises one or more of the following: fungicide, nematicide, bactericide, insecticide, and herbicide. Certain embodiments of the invention are any of the preceding methods, wherein the formulation optionally further comprises at least one additional endophyte.

[0098] In an aspect, the invention provides for a plurality of plant reproductive element compositions prepared according to any of the preceding methods, wherein compositions are confined within an object selected from the group consisting of: bottle, jar, ampule, package, vessel, bag, box, bin, envelope, carton, container, silo, shipping container, truck bed, and case.

[0099] In an aspect, the invention provides for a synthetic combination comprising a plant reproductive element treated with a formulation comprising a purified Penicillium endophyte population, wherein said Penicillium endophyte is heterologous to the plant reproductive element, and comprises at least 500 nucleotides at least 95% identical to a nucleic acid sequence selected from the group consisting of: SEQ ID NO:1, SEQ ID NO: 2, SEQ ID NO: 4, SEQ ID NO:5 wherein the endophyte is present in the synthetic combination in an amount capable of modulating at least one of: a trait of agronomic importance, the expression of a gene, the level of a transcript, the expression of a protein, the level of a hormone, the level of a metabolite, the population of endogenous microbes in plants grown from said plant reproductive element, as compared to an isoline plant grown from a plant reproductive element not contacted with said endophyte.

[0100] In an aspect, the invention provides for a synthetic combination comprising a plant reproductive element treated with a formulation comprising a purified Penicillium endophyte population, wherein said Penicillium endophyte is heterologous to the plant reproductive element, and comprises at least 100 nucleotides at least 95% identical to SEQ ID NO: 35 wherein the endophyte is present in the synthetic combination in an amount capable of modulating at least one of: a trait of agronomic importance, the expression of a gene, the level of a transcript, the expression of a protein, the level of a hormone, the level of a metabolite, the population of endogenous microbes in plants grown from said plant reproductive element, as compared to an isoline plant grown from a plant reproductive element not contacted with said endophyte.

[0101] In an aspect, the invention provides for a synthetic combination comprising a plant reproductive element treated with a formulation comprising a purified Penicillium endophyte population, wherein said Penicillium endophyte is heterologous to the plant reproductive element, and comprises a Deposit selected from the group consisting of: ______ Deposit ID ______, ______ Deposit ID ______, ______ Deposit ID ______, ______ Deposit ID ______, or IDAC Deposit ID 081111-01 wherein the endophyte is present in the synthetic combination in an amount capable of modulating at least one of: a trait of agronomic importance, the expression of a gene, the level of a transcript, the expression of a protein, the level of a hormone, the level of a metabolite, the population of endogenous microbes in plants grown from said plant reproductive element, as compared to an isoline plant grown from a plant reproductive element not contacted with said endophyte.

[0102] In an aspect, the invention provides for a synthetic combination comprising a plant reproductive element treated with a formulation comprising a purified Penicillium endophyte population, wherein said Penicillium endophyte is heterologous to the plant reproductive element, and comprises a Penicillium species selected from the group consisting of: SMCD2206, chrysogenum, olsonii, griseofulvum, or janthinellum wherein the endophyte is present in the synthetic combination in an amount capable of modulating at least one of: a trait of agronomic importance, the expression of a gene, the level of a transcript, the expression of a protein, the level of a hormone, the level of a metabolite, the population of endogenous microbes in plants grown from said plant reproductive element, as compared to an isoline plant grown from a plant reproductive element not contacted with said endophyte.

[0103] In an embodiment, the invention provides for any of the preceding synthetic combinations wherein the plant is optionally soybean or maize. In an embodiment, the invention provides for any of the preceding synthetic combinations wherein the formulation optionally comprises a purified population of the Penicillium endophyte at a concentration of at least about 10̂2 CFU/ml in a liquid formulation or about 10̂2 CFU/gm in a non-liquid formulation. In an embodiment, the invention provides for any of the preceding synthetic combinations wherein the Penicillium endophyte is optionally capable of auxin production, nitrogen fixation, production of an antimicrobial compound, mineral phosphate solubilization, siderophore production, cellulase production, chitinase production, xylanase production, or acetoin production. In an embodiment, the invention provides for any of the preceding synthetic combinations wherein the trait of agronomic importance is optionally selected from the group consisting of: disease resistance, drought tolerance, heat tolerance, cold tolerance, salinity tolerance, metal tolerance, herbicide tolerance, chemical tolerance, improved water use efficiency, improved nitrogen utilization, improved nitrogen fixation, pest resistance, herbivore resistance, pathogen resistance, increase in yield, increase in yield under water-limited conditions, health enhancement, vigor improvement, growth improvement, photosynthetic capability improvement, nutrition enhancement, altered protein content, altered oil content, increase in biomass, increase in shoot length, increase in root length, improved root architecture, increase in seed weight, altered seed carbohydrate composition, altered seed oil composition, increase in radical length, number of pods, delayed senescence, stay-green, altered seed protein composition, increase in dry weight of mature plant reproductive elements, increase in fresh weight of mature plant reproductive elements, increase in number of mature plant reproductive elements per plant, increase in chlorophyll content, increase in number of pods per plant, increase in length of pods per plant, reduced number of wilted leaves per plant, reduced number of severely wilted leaves per plant, increase in number of non-wilted leaves per plant, improved plant visual appearance. In an embodiment, the invention provides for any of the preceding synthetic combinations wherein the Penicillium endophyte is optionally capable of localizing in a plant element of a plant grown from said seed, said plant element selected from the group consisting of: whole plant, seedling, meristematic tissue, ground tissue, vascular tissue, dermal tissue, seed, leaf, root, shoot, stem, flower, fruit, stolon, bulb, tuber, corm, keikis, and bud. In an embodiment, the invention provides for any of the preceding synthetic combinations wherein the plant reproductive element is optionally a seed or a transgenic seed. In an embodiment, the invention provides for any of the preceding synthetic combinations wherein the plant reproductive element is optionally placed into a substrate that promotes plant growth and wherein the substrate is optionally soil. In an embodiment, the invention provides for any of the preceding synthetic combinations wherein the plant reproductive elements are optionally placed in the soil in rows, with substantially equal spacing between each seed within each row. In an embodiment, the invention provides for any of the preceding synthetic combinations wherein the formulation optionally further comprises one or more of the following: a stabilizer, or a preservative, or a carrier, or a surfactant, or an anticomplex agent, or any combination thereof. In an embodiment, the invention provides for any of the preceding synthetic combinations wherein the formulation optionally further comprises one or more of the following: fungicide, nematicide, bactericide, insecticide, and herbicide. In an embodiment, the invention provides for a plant derived from any of the preceding synthetic combinations wherein the formulation optionally further comprises at least one additional endophyte. In an embodiment, the invention provides for a plant derived from any of the preceding synthetic combinations wherein the seed is optionally a transgenic seed.

[0104] In an aspect, the invention provides a plant derived from any of the preceding synthetic combinations wherein the plant comprises in at least one of its plant elements said endophyte. In an embodiment, the progeny of the plant optionally comprises in at least one of its plant elements said endophyte.

[0105] In an aspect, the invention provides a plurality of any of the preceding synthetic combinations, wherein the seed compositions are optionally confined within an object selected from the group consisting of: bottle, jar, ampule, package, vessel, bag, box, bin, envelope, carton, container, silo, shipping container, truck bed, and case.

[0106] In an embodiment, the Penicillium endophyte of any of the preceding synthetic combinations is optionally present in the colonized seed in an amount capable of providing a benefit to the seed or to agriculture. In an embodiment, the endophyte of any of the preceding synthetic combinations is optionally present in at least two compartments of the seed, selected from the group consisting of: embryo, seed coat, endosperm, cotyledon, hypocotyl, and radicle.

[0107] In an aspect, the invention provides a plurality of any of the preceding synthetic combinations, wherein the synthetic combinations are shelf-stable.

[0108] In an aspect, the invention provides a plant grown from any of the preceding synthetic combinations wherein the plant comprises modulation of the transcription of at least one gene involved in at least one of the following pathways: symbiosis enhancement, resistance to biotic stress, resistance to abiotic stress, growth promotion, cell wall composition, and developmental regulation.

[0109] In an aspect, the invention provides a plant grown from any of the preceding synthetic combinations wherein the plant comprises modulation of the transcription of at least one transcript involved in at least one of the following pathways: symbiosis enhancement, resistance to biotic stress, resistance to abiotic stress, growth promotion, cell wall composition, and developmental regulation.

[0110] In an aspect, the invention provides a plant grown from any of the preceding synthetic combinations wherein the plant comprises modulating the level of at least one hormone involved in a pathway selected from the group consisting of: developmental regulation, seed maturation, dormancy, response to environmental stresses, stomatal closure, expression of stress-related genes, drought tolerance, defense responses, infection response, pathogen response, disease resistance, systemic acquired resistance, transcriptional reprogramming, mechanical support, protection against biotic stress, protection against abiotic stress, signaling, nodulation inhibition, endophyte colonization, fatty acid deoxygenation, wound healing, antimicrobial substance production, metabolite catabolism, cell proliferation, and abscission.

[0111] In an aspect, the invention provides a plant grown from any of the preceding synthetic combinations wherein the plant comprises modulating at least one metabolite in at least one of the following plant metabolic pathways: alkaloid metabolism, phenylpropanoid metabolism, flavonoid biosynthesis, isoflavonoid biosynthesis, lipid metabolism, nitrogen metabolism, and carbohydrate metabolism.

[0112] In an aspect, the invention provides a plant grown from any of the preceding synthetic combinations wherein the plant comprises upregulation of at least one gene in root tissue, selected from the upregulated genes listed in Tables 7A, 7B, 7C, 7D, and 7E.

[0113] In an aspect, the invention provides a plant grown from any of the preceding synthetic combinations wherein the plant comprises upregulation of at least one gene in leaf tissue, selected from the upregulated genes listed in Tables 7A, 7B, 7C, 7D, and 7E.

[0114] In an aspect, the invention provides a plant grown from any of the preceding synthetic combinations wherein the plant comprises upregulation of at least one gene in stem tissue, selected from the upregulated genes listed in Tables 7A, 7B, 7C, 7D, and 7E.

[0115] In an aspect, the invention provides a plant grown from any of the preceding synthetic combinations wherein the plant comprises downregulation of at least one gene in root tissue, selected from the downregulated genes listed in Tables 7A, 7B, 7C, 7D, and 7E.

[0116] In an aspect, the invention provides a plant grown from any of the preceding synthetic combinations wherein the plant comprises downregulation of at least one gene in leaf tissue, selected from the downregulated genes listed in Tables 7A, 7B, 7C, 7D, and 7E.

[0117] In an aspect, the invention provides a plant grown from any of the preceding synthetic combinations wherein the plant comprises downregulation of at least one gene in stem tissue, selected from the downregulated genes listed in Tables 7A, 7B, 7C, 7D, and 7E.

[0118] In an aspect, the invention provides a plant grown from any of the preceding synthetic combinations wherein the plant comprises upregulation of at least one transcript in root tissue, selected from the upregulated transcripts listed in Table 7F.

[0119] In an aspect, the invention provides a plant grown from any of the preceding synthetic combinations wherein the plant comprises upregulation of at least one transcript in leaf tissue, selected from the upregulated transcripts listed in Table 7F.

[0120] In an aspect, the invention provides a plant grown from any of the preceding synthetic combinations wherein the plant comprises upregulation of at least one transcript in stem tissue, selected from the upregulated transcripts listed in Table 7F.

[0121] In an aspect, the invention provides a plant grown from any of the preceding synthetic combinations wherein the plant comprises downregulation of at least one transcript in root tissue, selected from the downregulated transcripts listed in Table 7F.

[0122] In an aspect, the invention provides a plant grown from any of the preceding synthetic combinations wherein the plant comprises downregulation of at least one transcript in leaf tissue, selected from the downregulated transcripts listed in Table 7F.

[0123] In an aspect, the invention provides a plant grown from any of the preceding synthetic combinations wherein the plant comprises downregulation of at least one transcript in stem tissue, selected from the downregulated transcripts listed in Table 7F.

[0124] In an aspect, the invention provides a plant grown from any of the preceding synthetic combinations wherein the plant comprises an increase in hormone level in root tissue, selected from the group consisting of: JA, JAOILE, OPDA, OPEA, TA.

[0125] In an aspect, the invention provides a plant grown from any of the preceding synthetic combinations wherein the plant comprises a decrease in hormone level in root tissue, selected from the group consisting of: ABA, SA, CA.

[0126] In an aspect, the invention provides a plant grown from any of the preceding synthetic combinations wherein the plant comprises an increase in hormone level in stem tissue, selected from the group consisting of: SA, CA, JA-ILE, OPDA, OPEA.

[0127] In an aspect, the invention provides a plant grown from any of the preceding synthetic combinations wherein the plant comprises a decrease in hormone level in stem tissue, selected from the group consisting of: ABA, JA, TA.

[0128] In an aspect, the invention provides a plant grown from any of the preceding synthetic combinations wherein the plant comprises an increase in hormone level in leaf tissue, selected from the group consisting of: SA, CA, OPDA, TA.

[0129] In an aspect, the invention provides a plant grown from any of the preceding synthetic combinations wherein the plant comprises a decrease in hormone level in leaf tissue, selected from the group consisting of: ABA, JA, JA-ILE, OPEA.

[0130] In an aspect, the invention provides a plant grown from any of the preceding synthetic combinations wherein the plant comprises an increase in metabolite level in root tissue, selected from an increased metabolite in root tissue listed in Table 10.

[0131] In an aspect, the invention provides a plant grown from any of the preceding synthetic combinations wherein the plant comprises a decrease in metabolite level in root tissue, selected from a decreased metabolite in root tissue listed in Table 10.

[0132] In an aspect, the invention provides a plant grown from any of the preceding synthetic combinations wherein the plant comprises an increase in metabolite level in stem tissue, selected from an increased metabolite in stem tissue listed in Table 10.

[0133] In an aspect, the invention provides a plant grown from any of the preceding synthetic combinations wherein the plant comprises a decrease in metabolite level in stem tissue, selected from a decreased metabolite in stem tissue listed in Table 10.

[0134] In an aspect, the invention provides a plant grown from any of the preceding synthetic combinations wherein the plant comprises an increase in metabolite level in leaf tissue, selected from an increased metabolite in leaf tissue listed in Table 10.

[0135] In an aspect, the invention provides a plant grown from any of the preceding synthetic combinations wherein the plant comprises a decrease in metabolite level in leaf tissue, selected from a decreased metabolite in leaf tissue listed in Table 10.

[0136] In an aspect, the invention provides a plant grown from any of the preceding synthetic combinations wherein the plant comprises an increase in abundance of microorganisms of the family Glomeraceae.

[0137] In an aspect, the invention provides a plant grown from any of the preceding synthetic combinations wherein the plant comprises an increase in abundance of microorganisms of the genus Rhizophagus.

[0138] In an aspect, the invention provides a plant grown from any of the preceding synthetic combinations wherein the plant comprises an increase in abundance of microorganisms of the genus Glomus.

[0139] In an aspect, the invention provides a plant grown from any of the preceding synthetic combinations wherein the plant comprises a decrease in abundance of microorganisms of the family Enterobacteriaceae.

[0140] In an aspect, the invention provides a plant grown from any of the preceding synthetic combinations wherein the plant comprises a decrease in abundance of microorganisms of the genus Escherhia-Shigella

[0141] In an aspect, the invention provides a plant grown from any of the preceding synthetic combinations wherein the plant comprises a presence of at least one OTU described in Table 11A or Table 11B.

[0142] In an aspect, the invention provides a plant grown from any of the preceding synthetic combinations wherein the plant comprises an increase in presence of at least one OTU selected from Table 11C.

[0143] 1. In an aspect, the invention provides a plant grown from the synthetic combination of claim 28, said plant exhibiting a trait of agronomic interest, selected from the group consisting of: disease resistance, drought tolerance, heat tolerance, cold tolerance, salinity tolerance, metal tolerance, herbicide tolerance, chemical tolerance, improved water use efficiency, improved nitrogen utilization, improved nitrogen fixation, pest resistance, herbivore resistance, pathogen resistance, increase in yield, increase in yield under water-limited conditions, health enhancement, vigor improvement, growth improvement, photosynthetic capability improvement, nutrition enhancement, altered protein content, altered oil content, increase in biomass, increase in shoot length, increase in root length, improved root architecture, increase in seed weight, altered seed carbohydrate composition, altered seed oil composition, increase in radical length, number of pods, delayed senescence, stay-green, altered seed protein composition, increase in dry weight of mature plant reproductive elements, increase in fresh weight of mature plant reproductive elements, increase in number of mature plant reproductive elements per plant, increase in chlorophyll content, increase in number of pods per plant, increase in length of pods per plant, reduced number of wilted leaves per plant, reduced number of severely wilted leaves per plant, increase in number of non-wilted leaves per plant, improved plant visual appearance. In an embodiment, the plant is optionally soybean or maize. In an embodiment, the plant or progeny of the plant comprises at least one of its plant elements said Penicillium endophyte.

### BRIEF DESCRIPTION OF THE FIGURES

[0144] These and other features, aspects, and advantages of the present invention will become better understood with regard to the following description, and accompanying figure, where:

[0145] FIG. 1: Culture plate of Strain A

[0146] FIG. 2: Culture plate of Strain B

[0147] FIG. 3: Culture plate of Strain D

[0148] FIG. 4: Culture plate of Strain E

[0149] FIG. 5: Culture plate of Strain F

[0150] FIG. 6: Culture plate of Strain G

[0151] FIG. 7: Greenhouse phenotypes of plants grown from seeds treated with

[0152] Penicillium Strain A as compared to plants grown from seeds treated with formulation control, under water-limited conditions.

[0153] FIG. 8: Greenhouse phenotypes of plants grown from seeds treated with Penicillium Strain B as compared to plants grown from seeds treated with formulation control, under water-limited conditions.

[0154] FIG. 9: Greenhouse phenotypes of plants grown from seeds treated with Penicillium Strain D as compared to plants grown from seeds treated with formulation control, under water-limited conditions.

[0155] FIG. 10: Greenhouse phenotypes of plants grown from seeds treated with Penicillium Strain E as compared to plants grown from seeds treated with formulation control, under water-limited conditions.

[0156] FIG. 11: Greenhouse phenotypes of plants grown from seeds treated with Penicillium Strain F as compared to plants grown from seeds treated with formulation control, under water-limited conditions.

[0157] FIG. 12: Greenhouse phenotypes of plants grown from seeds treated with Penicillium Strain G as compared to plants grown from seeds treated with formulation control, under water-limited conditions.

[0158] FIG. 13: Greenhouse phenotypes of plants grown from seeds treated with Strain B as compared to plants grown from seeds treated with formulation control as well as untreated seeds, under normal watering conditions

[0159] FIG. 14: Greenhouse phenotypes of plants grown from seeds treated with Strain B as compared to plants grown from seeds treated with formulation control as well as untreated seeds, under water-limited conditions

### DEFINITIONS

[0160] Terms used in the claims and specification are defined as set forth below unless otherwise specified.

[0161] It must be noted that, as used in the specification and the appended claims, the singular forms “a,” “an” and “the” include plural referents unless the context clearly dictates otherwise.

[0162] An “endophyte” is an organism capable of living within a plant or otherwise associated therewith, and does not cause disease or harm the plant otherwise. Endophytes can occupy the intracellular or extracellular spaces of plant tissue, including the leaves, stems, flowers, fruits, seeds, or roots. An endophyte can be for example a bacterial or fungal organism, and can confer a beneficial property to the host plant such as an increase in yield, biomass, resistance, or fitness. An endophyte can be a fungus or a bacterium.

[0163] A “plurality of endophytes” means two or more types of endophyte entities, e.g., of simple bacteria or simple fungi, complex fungi, or combinations thereof. In some embodiments, the two or more types of endophyte entities are two or more strains of endophytes. In other embodiments, the two or more types of endophyte entities are two or more species of endophytes. In yet other embodiments, the two or more types of endophyte entities are two or more genera of endophytes. In yet other embodiments, the two or more types of endophyte entities are two or more families of endophytes. In yet other embodiments, the two or more types of endophyte entities are two or more orders of endophytes.

[0164] As used herein, the term “microbe” or “microorganism” refers to any species or taxon of microorganism, including, but not limited to, archaea, bacteria, microalgae, fungi (including mold and yeast species), mycoplasmas, microspores, nanobacteria, oomycetes, and protozoa. In some embodiments, a microbe or microorganism is an endophyte. In some embodiments, a microbe is an endophyte, for example a bacterial or fungal endophyte, which is capable of living within a plant. In some embodiments, a microbe or microorganism encompasses individual cells (e.g., unicellular microorganisms) or more than one cell (e.g., multi-cellular microorganism). A “population of microorganisms” may thus refer to a multiple cells of a single microorganism, in which the cells share common genetic derivation.

[0165] As used herein, the term “bacterium” or “bacteria” refers in general to any prokaryotic organism, and may reference an organism from either Kingdom Eubacteria (Bacteria), Kingdom Archaebacteria (Archae), or both. In some cases, bacterial genera or other taxonomic classifications have been reassigned due to various reasons (such as but not limited to the evolving field of whole genome sequencing), and it is understood that such nomenclature reassignments are within the scope of any claimed taxonomy. For example, certain species of the genus Erwinia have been described in the literature as belonging to genus Pantoea (Zhang and Qiu, 2015).

[0166] The term 16S refers to the DNA sequence of the 16S ribosomal RNA (rRNA) sequence of a bacterium. 16S rRNA gene sequencing is a well-established method for studying phylogeny and taxonomy of bacteria.

[0167] As used herein, the term “fungus” or “fungi” refers in general to any organism from Kingdom Fungi. Historical taxonomic classification of fungi has been according to morphological presentation. Beginning in the mid-1800's, it was became recognized that some fungi have a pleomorphic life cycle, and that different nomenclature designations were being used for different forms of the same fungus. In 1981, the Sydney Congress of the International Mycological Association laid out rules for the naming of fungi according to their status as anamorph, teleomorph, or holomorph (Taylor, 2011). With the development of genomic sequencing, it became evident that taxonomic classification based on molecular phylogenetics did not align with morphological-based nomenclature (Shenoy, 2007). As a result, in 2011 the International Botanical Congress adopted a resolution approving the International Code of Nomenclature for Algae, Fungi, and Plants (Melbourne Code) (2012), with the stated outcome of designating “One Fungus=One Name” (Hawksworth, 2012). However, systematics experts have not aligned on common nomenclature for all fungi, nor are all existing databases and information resources inclusive of updated taxonomies. As such, many fungi referenced herein may be described by their anamorph form but it is understood that based on identical genomic sequencing, any pleomorphic state of that fungus may be considered to be the same organism. For example, the genus Alternaria is the anamorph form of the teleomorph genus Lewia (Kwasna 2003), ergo both would be understood to be the same organism with the same DNA sequence. For example, it is understood that the genus Acremonium is also reported in the literature as genus Sarocladium as well as genus Tilachilidium (Summerbell, 2011). For example, the genus Cladosporium is an anamorph of the teleomorph genus Davidiella (Bensch, 2012), and is understood to describe the same organism. In some cases, fungal genera have been reassigned due to various reasons, and it is understood that such nomenclature reassignments are within the scope of any claimed genus. For example, certain species of the genus Microdiplodia have been described in the literature as belonging to genus Paraconiothyrium (Crous and Groenveld, 2006).

[0168] “Internal Transcribed Spacer” (ITS) refers to the spacer DNA (non-coding DNA) situated between the small-subunit ribosomal RNA (rRNA) and large-subunit (LSU) rRNA genes in the chromosome or the corresponding transcribed region in the polycistronic rRNA precursor transcript. ITS gene sequencing is a well-established method for studying phylogeny and taxonomy of fungi. In some cases, the “Large SubUnit” (LSU) sequence is used to identify fungi. LSU gene sequencing is a well-established method for studying phylogeny and taxonomy of fungi. Some fungal endophytes of the present invention may be described by an ITS sequence and some may be described by an LSU sequence. Both are understood to be equally descriptive and accurate for determining taxonomy.

[0169] As used herein with respect to fungi and bacteria, the term “marker gene” refers to an organism's 16S (for bacteria) or ITS (for fungi) polynucleotide sequence, by which a microbe may be specifically identified and assigned taxonomic nomenclature.

[0170] The terms “pathogen” and “pathogenic” in reference to a bacterium or fungus includes any such organism that is capable of causing or affecting a disease, disorder or condition of a host comprising the organism.

[0171] A “spore” or a population of “spores” refers to bacteria or fungi that are generally viable, more resistant to environmental influences such as heat and bactericidal or fungicidal agents than other forms of the same bacteria or fungi, and typically capable of germination and out-growth. Bacteria and fungi that are “capable of forming spores” are those bacteria and fungi comprising the genes and other necessary abilities to produce spores under suitable environmental conditions.

[0172] “Biomass” means the total mass or weight (fresh or dry), at a given time, of a plant tissue, plant tissues, an entire plant, or population of plants. Biomass is usually given as weight per unit area. The term may also refer to all the plants or species in the community (community biomass).

[0173] The term “isolated” is intended to specifically reference an organism, cell, tissue, polynucleotide, or polypeptide that is removed from its original source and purified from additional components with which it was originally associated. For example, an endophyte may be considered isolated from a seed if it is removed from that seed source and purified so that it is isolated from any additional components with which it was originally associated. Similarly, an endophyte may be removed and purified from a plant or plant element so that it is isolated and no longer associated with its source plant or plant element.

[0174] As used herein, an isolated strain of a microbe is a strain that has been removed from its natural milieu. “Pure cultures” or “isolated cultures” are cultures in which the organisms present are only of one strain of a particular genus and species. This is in contrast to “mixed cultures,” which are cultures in which more than one genus and/or species of microorganism are present. As such, the term “isolated” does not necessarily reflect the extent to which the microbe has been purified. A “substantially pure culture” of the strain of microbe refers to a culture which contains substantially no other microbes than the desired strain or strains of microbe. In other words, a substantially pure culture of a strain of microbe is substantially free of other contaminants, which can include microbial contaminants. Further, as used herein, a “biologically pure” strain is intended to mean the strain separated from materials with which it is normally associated in nature. A strain associated with other strains, or with compounds or materials that it is not normally found with in nature, is still defined as “biologically pure.” A monoculture of a particular strain is, of course, “biologically pure.” As used herein, the term “enriched culture” of an isolated microbial strain refers to a microbial culture that contains more that 50%, 60%, 70%, 80%, 90%, or 95% of the isolated strain.

[0175] A “host plant” includes any plant, particularly a plant of agronomic importance, which an endophytic entity such as an endophyte can colonize. As used herein, an endophyte is said to “colonize” a plant or plant element when it can be stably detected within the plant or plant element over a period time, such as one or more days, weeks, months or years, in other words, a colonizing entity is not transiently associated with the plant or plant element. Such host plants are preferably plants of agronomic importance.

[0176] A “non-host target” means an organism or chemical compound that is altered in some way after contacting a host plant that comprises an endophyte, as a result of a property conferred to the host plant by the endophyte.

[0177] As used herein, a nucleic acid has “homology” or is “homologous” to a second nucleic acid if the nucleic acid sequence has a similar sequence to the second nucleic acid sequence. The terms “identity,” “percent sequence identity” or “identical” in the context of nucleic acid sequences refer to the residues in the two sequences that are the same when aligned for maximum correspondence. There are a number of different algorithms known in the art that can be used to measure nucleotide sequence identity. For instance, polynucleotide sequences can be compared using FASTA, Gap or Bestfit, which are programs in Wisconsin Package Version 10.0, Genetics Computer Group (GCG), Madison, Wis. FASTA provides alignments and percent sequence identity of the regions of the best overlap between the query and search sequences. Pearson, Methods Enzymol. 183:63-98 (1990). In some embodiments, sequences can be compared using Geneious (Biomatters, Ltd., Auckland, New Zealand). In other embodiments, polynucleotide sequences can be compared using the multiple sequence alignment algorithm MUSCLE (Edgar R C, 2004).

[0178] The term “substantial homology” or “substantial similarity,” when referring to a nucleic acid or fragment thereof, indicates that, when optimally aligned with appropriate nucleotide insertions or deletions with another nucleic acid (or its complementary strand), there is nucleotide sequence identity in at least about 76%, 80%, 85%, or at least about 90%, or at least about 95%, 96%, 97%, 98% 99%, 99.5% or 100% of the nucleotide bases, as measured by any well-known algorithm of sequence identity, such as FASTA, BLAST, Gap, MUSCLE, or any other method known in the art.

[0179] As used herein, the terms “operational taxonomic unit,” “OTU,” “taxon,” “hierarchical cluster,” and “cluster” are used interchangeably. An operational taxon unit (OTU) refers to a group of one or more organisms that comprises a node in a clustering tree. The level of a cluster is determined by its hierarchical order. In one embodiment, an OTU is a group tentatively assumed to be a valid taxon for purposes of phylogenetic analysis. In another embodiment, an OTU is any of the extant taxonomic units under study. In yet another embodiment, an OTU is given a name and a rank. For example, an OTU can represent a domain, a sub-domain, a kingdom, a sub-kingdom, a phylum, a sub-phylum, a class, a sub-class, an order, a sub-order, a family, a subfamily, a genus, a subgenus, or a species. In some embodiments, OTUs can represent one or more organisms from the kingdoms eubacteria, protista, or fungi at any level of a hierarchal order. In some embodiments, an OTU represents a prokaryotic or fungal order.

[0180] In some embodiments, the present invention contemplates the synthetic combinations comprising the combination of a plant element, seedling, or whole plants and an endophyte population, in which the endophyte population is “heterologously disposed.” In some embodiments, “heterologously disposed” means that the native plant element, seedling, or plant does not contain detectable levels of the microbe in that same plant element, seedling, or plant. For example if said plant element or seedling or plant does not naturally have the endophyte associated with it and the endophyte is applied, the endophyte would be considered to be heterologously disposed. In some embodiments, “heterologously disposed” means that the endophyte is being applied to a different plant element than that with which the endophyte is naturally associated. For example, if said plant element or seedling or plant has the endophyte normally found in the root tissue but not in the leaf tissue, and the endophyte is applied to the leaf, the endophyte would be considered to be heterologously disposed. In some embodiments, “heterologously disposed” means that the endophyte being applied to a different tissue or cell layer of the plant element than that in which the microbe is naturally found. For example, if endophyte is naturally found in the mesophyll layer of leaf tissue but is being applied to the epithelial layer, the endophyte would be considered to be heterologously disposed. In some embodiments, “heterologously disposed” means that the endophyte being applied is at a greater concentration, number, or amount of the plant element, seedling, or plant, than that which is naturally found in said plant element, seedling, or plant. For example, an endophyte concentration that is being applied is at least 1.5 times greater, between 1.5 and 2 times greater, 2 times greater, between 2 and 3 times greater, 3 times greater, between 3 and 5 times greater, 5 times greater, between 5 and 7 times greater, 7 times greater, between 7 and 10 times greater, 10 times greater, or even greater than 10 times higher number, amount, or concentration than that which is naturally present, the endophyte would be considered to be heterologously disposed. In some embodiments, “heterologously disposed” means that the endophyte is applied to a developmental stage of the plant element, seedling, or plant in which said endophyte is not naturally associated, but may be associated at other stages. For example, if an endophyte is normally found at the flowering stage of a plant and no other stage, an endophyte applied at the seedling stage may be considered to be heterologously disposed. For example, an endophyte that is normally associated with leaf tissue of a cupressaceous tree sample would be considered heterologous to leaf tissue of a maize plant. In another example, an endophyte that is normally associated with leaf tissue of a maize plant is considered heterologous to a leaf tissue of another maize plant that naturally lacks said endophyte. In another example, an endophyte that is normally associated at low levels in a plant is considered heterologous to that plant if a higher concentration of that endophyte is introduced into the plant. In yet another example, an endophyte that is associated with a tropical grass species would be considered heterologous to a wheat plant.

[0181] The term “isoline” is a comparative term, and references organisms that are genetically identical, but may differ in treatment. In one example, two genetically identical maize plant embryos may be separated into two different groups, one receiving a treatment (such as transformation with a heterologous polynucleotide, to create a genetically modified plant) and one control that does not receive such treatment. Any phenotypic differences between the two groups may thus be attributed solely to the treatment and not to any inherency of the plant's genetic makeup. In another example, two genetically identical soybean seeds may be treated with a formulation that introduces an endophyte composition. Any phenotypic differences between the plants derived from (e.g., grown from or obtained from) those seeds may be attributed to the treatment, thus forming an isoline comparison.

[0182] Similarly, by the term “reference agricultural plant,” it is meant an agricultural plant of the same species, strain, or cultivar to which a treatment, formulation, composition or endophyte preparation as described herein is not administered/contacted. A reference agricultural plant, therefore, is identical to the treated plant with the exception of the presence of the endophyte and can serve as a control for detecting the effects of the endophyte that is conferred to the plant.

[0183] A “reference environment” refers to the environment, treatment or condition of the plant in which a measurement is made. For example, production of a compound in a plant associated with an endophyte can be measured in a reference environment of drought stress, and compared with the levels of the compound in a reference agricultural plant under the same conditions of drought stress. Alternatively, the levels of a compound in plant associated with an endophyte and reference agricultural plant can be measured under identical conditions of no stress.

[0184] A “plant element” is intended to generically reference either a whole plant or a plant component, including but not limited to plant tissues, parts, and cell types. A plant element is preferably one of the following: whole plant, seedling, meristematic tissue, ground tissue, vascular tissue, dermal tissue, seed, leaf, root, shoot, stem, flower, fruit, stolon, bulb, tuber, corm, kelkis, shoot, bud. As used herein, a “plant element” is synonymous to a “portion” of a plant, and refers to any part of the plant, and can include distinct tissues and/or organs, and may be used interchangeably with the term “tissue” throughout.

[0185] Similarly, a “plant reproductive element” is intended to generically reference any part of a plant that is able to initiate other plants via either sexual or asexual reproduction of that plant, for example but not limited to: seed, seedling, root, shoot, cutting, scion, graft, stolon, bulb, tuber, corm, keikis, or bud.

[0186] A “population” of plants refers to more than one plant, that are of the same taxonomic categeory, typically be of the same species, and will also typically share a common genetic derivation.

[0187] As used herein, an “agricultural seed” is a seed used to grow a plant typically used in agriculture (an “agricultural plant”). The seed may be of a monocot or dicot plant, and may be planted for the production of an agricultural product, for example feed, food, fiber, fuel, industrial uses, etc. As used herein, an agricultural seed is a seed that is prepared for planting, for example, in farms for growing.

[0188] “Agricultural plants,” or “plants of agronomic importance,” include plants that are cultivated by humans for food, feed, fiber, fuel, and/or industrial purposes. Agricultural plants include monocotyledonous species such as: maize (Zea mays), common wheat (Triticum aestivum), spelt (Triticum spelta), einkorn wheat (Triticum monococcum), emmer wheat (Triticum dicoccum), durum wheat (Triticum durum), Asian rice (Oryza sativa), African rice (Oryza glabaerreima), wild rice (Zizania aquatica, Zizania latifolia, Zizania palustris, Zizania texana), barley (Hordeum vulgare), Sorghum (Sorghum bicolor), Finger millet (Eleusine coracana), Proso millet (Panicum miliaceum), Pearl millet (Pennisetum glaucum), Foxtail millet (Setaria italica), Oat (Avena sativa), Triticale (Triticosecale), rye (Secale cereal), Russian wild rye (Psathyrostachys juncea), bamboo (Bambuseae), or sugarcane (e.g., Saccharum arundinaceum, Saccharum barberi, Saccharum bengalense, Saccharum edule, Saccharum munja, Saccharum officinarum, Saccharum procerum, Saccharum ravennae, Saccharum robustum, Saccharum sinense, or Saccharum spontaneum); as well as dicotyledonous species such as: soybean (Glycine max), canola and rapeseed cultivars (Brassica napus), cotton (genus Gossypium), alfalfa (Medicago sativa), cassava (genus Manihot), potato (Solanum tuberosum), tomato (Solanum lycopersicum), pea (Pisum sativum), chick pea (Cicer arietinum), lentil (Lens culinaris), flax (Linum usitatissimum) and many varieties of vegetables.

[0189] The term “synthetic combination” means one or more plant elements associated by human endeavor with an isolated, purified endophyte composition, said association which is not found in nature. In some embodiments of the present invention, “synthetic combination” is used to refer to a treatment formulation comprising an isolated, purified population of endophytes associated with a plant element. In some embodiments of the present invention, “synthetic combination” refers to a purified population of endophytes in a treatment formulation comprising additional compositions with which said endophytes are not found associated in nature.

[0190] A “treatment formulation” refers to a mixture of chemicals that facilitate the stability, storage, and/or application of the endophyte composition(s). Treatment formulations may comprise any one or more agents such as: surfactant, a buffer, a tackifier, a microbial stabilizer, a fungicide, an anticomplex agent, an herbicide, a nematicide, an insecticide, a plant growth regulator, a rodenticide, a desiccant, a nutrient, an excipient, a wetting agent, a salt.

[0191] In some embodiments, an “agriculturally compatible carrier” can be used to formulate an agricultural formulation or other composition that includes a purified endophyte preparation. As used herein an “agriculturally compatible carrier” refers to any material, other than water, that can be added to a plant element without causing or having an adverse effect on the plant element (e.g., reducing seed germination) or the plant that grows from the plant element, or the like.

[0192] The compositions and methods herein may provide for an improved “agronomic trait” or “trait of agronomic importance” to a host plant, which may include, but not be limited to, the following: disease resistance, drought tolerance, heat tolerance, cold tolerance, salinity tolerance, metal tolerance, herbicide tolerance, improved water use efficiency, improved nitrogen utilization, improved nitrogen fixation, pest resistance, herbivore resistance, pathogen resistance, yield improvement, health enhancement, vigor improvement, growth improvement, photosynthetic capability improvement, nutrition enhancement, altered protein content, altered oil content, increased biomass, increased shoot length, increased root length, improved root architecture, modulation of a metabolite, modulation of the proteome, increased seed weight, altered seed carbohydrate composition, altered seed oil composition, altered seed protein composition, altered seed nutrient composition, compared to an isoline plant derived from a seed without said seed treatment formulation.

[0193] As used herein, the terms “water-limited condition” and “drought condition,” or “water-limited” and “drought,” may be used interchangeably. For example, a method or composition for improving a plant's ability to grow under drought conditions means the same as the ability to grow under water-limited conditions. In such cases, the plant can be further said to display improved tolerance to drought stress.

[0194] As used herein, the terms “normal watering” and “well-watered” are used interchangeably, to describe a plant grown under typical growth conditions with no water restriction.

[0195] Additionally, “altered metabolic function” or “altered enzymatic function” may include, but not be limited to, the following: altered production of an auxin, altered nitrogen fixation, altered production of an antimicrobial compound, altered production of a siderophore, altered mineral phosphate solubilization, altered production of a cellulase, altered production of a chitinase, altered production of a xylanase, altered production of acetoin, altered utilization of a carbon source.

[0196] An “increased yield” can refer to any increase in biomass or seed or fruit weight, seed size, seed number per plant, seed number per unit area, bushels per acre, tons per acre, kilo per hectare, or carbohydrate yield. Typically, the particular characteristic is designated when referring to increased yield, e.g., increased grain yield or increased seed size.

[0197] “Nutrient” or “seed nutrient” refers to any composition of the associated plant element, most particularly compositions providing benefit to other organisms that consume or utilize said plant element.

[0198] “Agronomic trait potential” is intended to mean a capability of a plant element for exhibiting a phenotype, preferably an improved agronomic trait, at some point during its life cycle, or conveying said phenotype to another plant element with which it is associated in the same plant. For example, a plant element may comprise an endophyte that will provide benefit to leaf tissue of a plant from which the plant element is grown; in such case, the plant element comprising such endophyte has the agronomic trait potential for a particular phenotype (for example, increased biomass in the plant) even if the plant element itself does not display said phenotype.

[0199] In some cases, the present invention contemplates the use of compositions that are “compatible” with agricultural chemicals, including but not limited to, a fungicide, an anticomplex compound, a bactericide, a virucide, an herbicide, a nematicide, a parasiticide, a pesticide, or any other agent widely used in agricultural which has the effect of killing or otherwise interfering with optimal growth of another organism. As used herein, a composition is “compatible” with an agricultural chemical when the organism is modified, such as by genetic modification, e.g., contains a transgene that confers resistance to an herbicide, or is adapted to grow in, or otherwise survive, the concentration of the agricultural chemical used in agriculture. For example, an endophyte disposed on the surface of a plant element is compatible with the fungicide metalaxyl if it is able to survive the concentrations that are applied on the plant element surface.

[0200] As used herein, a “colony-forming unit” (“CFU”) is used as a measure of viable microorganisms in a sample. A CFU is an individual viable cell capable of forming on a solid medium a visible colony whose individual cells are derived by cell division from one parental cell.

[0201] As used herein, the terms “contacting” and “associating” (and their derivatives) can refer to the method of introducting an endophyte to a non-endophyte, for example to a plant reproductive element, e.g., a seed. The result can include the endophyte being present in a stable relationship with the plant reproductive element, for example on the surface of a seed, in the interior of a seed, or in a formulation that itself is associated with a seed.

[0202] The terms “decreased,” “fewer,” “slower” and “increased” “faster” “enhanced” “greater” as used herein refers to a decrease or increase in a characteristic of the endophyte treated plant element or resulting plant compared to an untreated plant element or resulting plant. For example, a decrease in a characteristic may be at least 1%, at least 2%, at least 3%, at least 4%, at least 5%, between 5% and 10%, at least 10%, between 10% and 20%, at least 15%, at least 20%, between 20% and 30%, at least 25%, at least 30%, between 30% and 40%, at least 35%, at least 40%, between 40% and 50%, at least 45%, at least 50%, between 50% and 60%, at least about 60%, between 60% and 70%, between 70% and 80%, at least 75%, at least about 80%, between 80% and 90%, at least about 90%, between 90% and 100%, at least 100%, between 100% and 200%, at least 200%, at least about 300%, at least about 400% or more lower than the untreated control and an increase may be at least 1%, at least 2%, at least 3%, at least 4%, at least 5%, between 5% and 10%, at least 10%, between 10% and 20%, at least 15%, at least 20%, between 20% and 30%, at least 25%, at least 30%, between 30% and 40%, at least 35%, at least 40%, between 40% and 50%, at least 45%, at least 50%, between 50% and 60%, at least about 60%, between 60% and 70%, between 70% and 80%, at least 75%, at least about 80%, between 80% and 90%, at least about 90%, between 90% and 100%, at least 100%, between 100% and 200%, at least 200%, at least about 300%, at least about 400% or more higher than the untreated control.

### DETAILED DESCRIPTION OF THE INVENTION

[0203] As demonstrated herein, agricultural plants may be associated with symbiotic microorganisms, termed endophytes, particularly bacteria and fungi, which may contribute to plant survival, performance, and characteristics. However, modern agricultural processes may have perturbed this relationship, resulting in increased crop losses, diminished stress resilience, biodiversity losses, and increasing dependence on external chemicals, fertilizers, and other unsustainable agricultural practices. There is a need for novel compositions and methods for generating plants with novel microbiome properties that can sustainably increase yield, improve stress resilience, and decrease fertilizer and chemical use.

[0204] Currently, the generally accepted view of plant endophytic communities focuses on their homologous derivation, predominantly from the soil communities in which the plants are grown (Hallman, et al., (1997) Canadian Journal of Microbiology. 43(10): 895-914). Upon observing taxonomic overlap between the endophytic and soil microbiota in A. thaliana, it was stated, “Our rigorous definition of an endophytic compartment microbiome should facilitate controlled dissection of plant-microbe interactions derived from complex soil communities” (Lundberg et al., (2012) Nature. 488, 86-90). There is strong support in the art for soil representing the repository from which plant endophytes are derived. New Phytologist (2010) 185: 554-567. Notable plant-microbe interactions such as mycorrhyzal fungi and complex rhizobia fit the paradigm of soil-based colonization of plant hosts and appear to primarily establish themselves independently of seed. As a result of focusing attention on the derivation of endophytes from the soil in which the target agricultural plant is currently growing, there has been an inability to achieve commercially significant improvements in plant yields and other plant characteristics such as increased root biomass, increased root length, increased height, increased shoot length, increased leaf number, increased water use efficiency, increased overall biomass, increase grain yield, increased photosynthesis rate, increased tolerance to drought, increased heat tolerance, increased salt tolerance, increased resistance to insect and nematode stresses, increased resistance to a fungal pathogen, increased resistance to a complex pathogen, increased resistance to a viral pathogen, a detectable modulation in the level of a metabolite, a detectable modulation in the level of a transcript, or a detectable modulation in the proteome relative to a reference plant.

[0205] The inventors herein have conceived of using endophytes that are capable of living within or otherwise associated with plants to improve plant characteristics, as well as methods of using endophytes that are capable of being associated with plants, to impart novel characteristics to a host plant, as well as to distinct plant elements of the host plant. In an embodiment of this invention, endophyte compositions are isolated and purified from plant or fungal sources, and synthetically combined with a plant element, to impart improved agronomic potential and/or improved agronomic traits to the host plant. In another embodiment of the invention, endophytes that are capable of living within plants are isolated and purified from their native source(s) and synthetically combined with a plant element, to impart improved agronomic potential and/or improved agronomic traits to the host plant or the host plant's elements. Such endophytes that are capable of living within plants may be further manipulated or combined with additional elements prior to combining with the plant element(s).

[0206] As described herein, beneficial organisms can be robustly obtained from heterologous, homologous, or engineered sources, optionally cultured, administered heterologously to plant elements, and, as a result of the administration, confer multiple beneficial properties. This is surprising given the variability observed in the art in endophytic microbe isolation and the previous observations of inefficient plant element pathogen colonization of plant host's tissues.

[0207] In part, the present invention provides preparations of endophytes that are capable of living within plants, and the creation of synthetic combinations of plant elements and/or seedlings with heterologous endophytes, and formulations comprising the synthetic combinations, as well as the recognition that such synthetic combinations display a diversity of beneficial properties present in the agricultural plants and the associated endophyte populations newly created by the present inventors. Such beneficial properties include metabolism, transcript expression, proteome alterations, morphology, and the resilience to a variety of environmental stresses, and any combination of such properties. The present invention also provides methods of using such endophytes to benefit the host plant with which it is associated.

### Endophyte Compositions and Methods of Isolation

[0208] The endophytes of the present invention provide several unexpected and significant advantages over other plant-associated microbes. Different environments can comprise significantly different populations of endophytes and thus may provide reservoirs for desired endophytes. Once a choice environment is selected, plant elements of choice plants to be sampled can be identified by their healthy and/or robust growth, or other desired phenotypic characteristics.

[0209] In some embodiments of the present invention, endophytes may be fungi identified from a plant source. In some embodiments of the present invention, endophytes are fungi identified from a non-plant source, yet be capable of living within a plant, to create a new endophyte entity.

### Endophyte Selection: Sourcing

[0210] In some embodiments of the present invention, endophytes may be isolated from plants or plant elements. In an embodiment of the present invention, endophytes described herein can also be isolated from plants, plant elements, or endophytic fungi of plants or plant elements adapted to a particular environment, including, but not limited to, an environment with water deficiency, salinity, acute and/or chronic heat stress, acute and/or chronic cold stress, nutrient deprived soils including, but not limited to, micronutrient deprived soils, macronutrient (e.g., potassium, phosphate, nitrogen) deprived soils, pathogen stress, including fungal, nematode, insect, viral, and complex pathogen stress.

[0211] In one embodiment, a plant is harvested from a soil type different than that in which the plant is normally grown. In another embodiment, the plant is harvested from an ecosystem where the agricultural plant is not normally found. In another embodiment, the plant is harvested from a soil with an average pH range that is different from the optimal soil pH range of the agricultural plant. In one embodiment, the plant is harvested from an environment with average air temperatures lower than the normal growing temperature of the agricultural plant. In one embodiment, the plant is harvested from an environment with average air temperatures higher than the normal growing temperature of the agricultural plant. In another embodiment, the plant is harvested from an environment with average rainfall lower than the optimal average rainfall received by the agricultural plant. In one embodiment, the plant is harvested from an environment with average rainfall higher than the optimal average rainfall of the agricultural plant. In another embodiment, the plant is harvested from a soil type with different soil moisture classification than the normal soil type that the agricultural plant is grown on. In one embodiment, the plant is harvested from an environment with average rainfall lower than the optimal average rainfall of the agricultural plant. In one embodiment, the plant is harvested from an environment with average rainfall higher than the optimal average rainfall of the agricultural plant. In another embodiment, the plant is harvested from an agricultural environment with a yield lower than the average yield expected from the agricultural plant grown under average cultivation practices on normal agricultural land. In another embodiment, the plant is harvested from an agricultural environment with a yield lower than the average yield expected from the agricultural plant grown under average cultivation practices on normal agricultural land. In another embodiment, the plant is harvested from an environment with average yield higher than the optimal average yield of the agricultural plant. In another embodiment, the plant is harvested from an environment with average yield higher than the optimal average yield of the agricultural plant. In another embodiment, the plant is harvested from an environment where soil contains lower total nitrogen than the optimum levels recommended in order to achieve average yields for a plant grown under average cultivation practices on normal agricultural land. In another embodiment, the plant is harvested from an environment where soil contains higher total nitrogen than the optimum levels recommended in order to achieve average yields for a plant grown under average cultivation practices on normal agricultural land. In another embodiment, the plant is harvested from an environment where soil contains lower total phosphorus than the optimum levels recommended in order to achieve average yields for a plant grown under average cultivation practices on normal agricultural land. In another embodiment, the plant is harvested from an environment where soil contains higher total phosphorus than the optimum levels recommended in order to achieve average yields for a plant grown under average cultivation practices on normal agricultural land. In another embodiment, the plant is harvested from an environment where soil contains lower total potassium than the optimum levels recommended in order to achieve average yields for a plant grown under average cultivation practices on normal agricultural land. In another embodiment, the plant is harvested from an environment where soil contains higher total potassium than the optimum levels recommended in order to achieve average yields for a plant grown under average cultivation practices on normal agricultural land. In another embodiment, the plant is harvested from an environment where soil contains lower total sulfur than the optimum levels recommended in order to achieve average yields for a plant grown under average cultivation practices on normal agricultural land. In another embodiment, the plant is harvested from an environment where soil contains higher total sulfur than the optimum levels recommended in order to achieve average yields for a plant grown under average cultivation practices on normal agricultural land. In another embodiment, the plant is harvested from an environment where soil contains lower total calcium than the optimum levels recommended in order to achieve average yields for a plant grown under average cultivation practices on normal agricultural land. In another embodiment, the plant is harvested from an environment where soil contains lower total magnesium than the optimum levels recommended in order to achieve average yields for a plant grown under average cultivation practices on normal agricultural land. In another embodiment, the plant is harvested from an environment where soil contains higher total sodium chloride (salt) than the optimum levels recommended in order to achieve average yields for a plant grown under average cultivation practices on normal agricultural land.

[0212] Endophytes can be obtained from a host plant or a plant element of many distinct plants. In an embodiment, the endophyte can be obtained a plant element of the same or different crop, and can be from the same or different cultivar or variety as the plant element to which the composition is heterologously associated.

[0213] In another embodiment, endophytes used in a composition or used to make a synthetic combination can be obtained from the same cultivar or species of agricultural plant to which the composition is intended for heterologous association, or can be obtained from a different cultivar or species of agricultural plant. For example, endophytes from a particular corn variety can be isolated and coated onto the surface of a corn plant element of the same variety.

[0214] In another embodiment, endophytes used in a composition or used to make a synthetic combination can be obtained from a plant element of a plant that is related to the plant element to which the composition is intended to be association. For example, an endophyte isolated from Triticum monococcum (einkorn wheat) can be coated onto the surface of a T. aestivum (common wheat) plant element; or, an endophyte from Hordeum vulgare (barley) can be isolated and coated onto the plant element of a member of the Triticeae family, for example, plant elements of the rye plant, Secale cereale).

[0215] In still another embodiment, endophytes used in a composition or used to make a synthetic combination can be obtained from a plant element of a plant that is distantly related to the plant element onto which the endophyte is to be coated. For example, a tomato-derived endophyte can be isolated and coated onto a soybean plant element.

[0216] In some embodiments, a purified endophytes population is used that includes two or more (e.g., 3, 4, 5, 6, 7, 8, 9, 10, 15, 20, 25 or greater than 25) different endophytes, e.g., obtained from different families of plant or fungus, or different genera of plant or fungus, or from the same genera but different species of plant or fungus.

[0217] In yet another embodiment, endophytes used in a composition or used to make a synthetic combination can be obtained from different individual plants of the same variety, each of which has been subjected to different growth conditions. For example, an endophyte obtained from a drought-affected plant of one variety can be isolated and coated onto the plant element that was derived from a plant of the same variety not subjected to drought. In such cases, the endophyte is considered to be heterologously associated with the plant element onto which it is applied.

[0218] The heterologous relationship between the endophyte and the host plant element may result from an endophyte obtained from any different plant or plant element than that which with it becomes associated. In some cases, the endophyte is obtained from a different cultivar of the same species. In some cases, the endophyte is obtained from a different plant species. In some cases, the endophyte is obtained from the same plant species but from two different plants, each exposed to some different environmental condition (for example, differences in heat units or water stress). In some cases, the endophyte is obtained from the same plant individual but from different plant elements or tissues (for example, a root endophyte applied to a leaf).

[0219] In some embodiments, compositions described herein comprise a purified endophyte population is used that includes at least two or more, at least 3, at least 4, at least 5, at least 6, at least 7, at least 8, at least 9, at least 10, at least 15, at least 20, at least 25, or more (e.g., 3, 4, 5, 6, 7, 8, 9, 10, 15, 20, 25 or greater than 25) different endophytes, e.g., obtained from different families of plants, or different genera of plant or fungus, or from the same genera but different species of plants.

[0220] The different endophytes can be obtained from the same cultivar of agricultural plant (e.g., the same maize, wheat, rice, or barley plant), different cultivars of the same agricultural plant (e.g., two or more cultivars of maize, two or more cultivars of wheat, two or more cultivars of rice, or two or more cultivars of barley), or different species of the same type of agricultural plant (e.g., two or more different species of maize, two or more different species of wheat, two or more different species of rice, or two or more different species of barley). In embodiments in which two or more endophytes are used, each of the endophytes can have different properties or activities, e.g., produce different metabolites, produce different enzymes such as different hydrolytic enzymes, confer different beneficial traits, or colonize different elements of a plant (e.g., leaves, stems, flowers, fruits, seeds, or roots). For example, one endophyte can colonize a first and a second endophyte can colonize a tissue that differs from the first tissue. Combinations of endophytes are disclosed in detail below.

[0221] In an embodiment, the endophyte is an endophytic microbe isolated from a different plant than the inoculated plant. For example, in an embodiment, the endophyte is an endophyte isolated from a different plant of the same species as the inoculated plant. In some cases, the endophyte is isolated from a species related to the inoculated plant.

Endophyte Selection: Compatibility with Agrichemicals

[0222] In certain embodiments, the endophyte is selected on the basis of its compatibility with commonly used agrichemicals. As mentioned earlier, plants, particularly agricultural plants, can be treated with a vast array of agrichemicals, including fungicides, biocides (anticomplex agents), herbicides, insecticides, nematicides, rodenticides, bactericides, virucides, fertilizers, and other agents.

[0223] In some embodiments, the endophytes of the present invention display tolerance to an agrichemical selected from the group consisting of: Aeris®, Avicta® DuoCot 202, Cruiser®, Syntenta CCB® (A), Clariva®, Albaugh, Dynasty®, Apron®, Maxim®, Gaucho®, Provoke® ST, Syngenta CCB®, Trilex®, WG Purple, WG Silver, Azoxystrobin, Carboxin, Difenoconazole, Fludioxonil, fluxapyroxad, Ipconazole, Mefenoxam, Metalaxyl, Myclobutanil, Penflufen, pyraclostrobin, Sedaxane, TCMTB, Tebuconazole, Thiram, Triadimenol (Baytan®), Trifloxystrobin, Triticonazole, Tolclofos-methyl, PCNB, Abamectin, Chlorpyrifos, Clothianidin, Imidacloprid, Thiamethoxam, Thiodicarb.

[0224] In some cases, it can be important for the endophyte to be compatible with agrichemicals, particularly those with anticomplex properties, in order to persist in the plant although, as mentioned earlier, there are many such anticomplex agents that do not penetrate the plant, at least at a concentration sufficient to interfere with the endophyte. Therefore, where a systemic anticomplex agent is used in the plant, compatibility of the endophyte to be inoculated with such agents will be an important criterion.

[0225] In an embodiment, natural isolates of endophytes that are compatible with agrichemicals can be used to inoculate the plants according to the methods described herein. For example, endophytes that are compatible with agriculturally employed anticomplex agents can be isolated by plating a culture of endophytes on a petri dish comprising an effective concentration of the anticomplex agent, and isolating colonies of endophytes that are compatible with the anticomplex agent. In another embodiment, an endophyte that is compatible with an anticomplex agent is used for the methods described herein.

[0226] Bactericide-compatible endophyte can also be isolated by selection on liquid medium. The culture of endophytes can be plated on petri dishes without any forms of mutagenesis; alternatively, endophytes can be mutagenized using any means known in the art. For example, endophyte cultures can be exposed to UV light, gamma-irradiation, or chemical mutagens such as ethylmethanesulfonate (EMS), ethidium bromide (EtBr) dichlovos (DDVP, methyl methane sulphonale (MMS), triethylphosphate (TEP), trimethylphosphate (TMP), nitrous acid, or DNA base analogs, prior to selection on fungicide comprising media. Finally, where the mechanism of action of a particular bactericide is known, the target gene can be specifically mutated (either by gene deletion, gene replacement, site-directed mutagenesis, etc.) to generate an endophyte that is resilient against that particular chemical. It is noted that the above-described methods can be used to isolate endophytes that are compatible with both bacteriostatic and bactericidal compounds.

[0227] It will also be appreciated by one skilled in the art that a plant may be exposed to multiple types of anticomplex compounds, either simultaneously or in succession, for example at different stages of plant growth. Where the target plant is likely to be exposed to multiple anticomplex agents, an endophyte that is compatible with many or all of these agrichemicals can be used to inoculate the plant. An endophyte that is compatible with several agents can be isolated, for example, by serial selection. An endophyte that is compatible with the first agent can be isolated as described above (with or without prior mutagenesis). A culture of the resulting endophyte can then be selected for the ability to grow on liquid or solid media comprising the second agent (again, with or without prior mutagenesis). Colonies isolated from the second selection are then tested to confirm its compatibility to both agents.

[0228] Likewise, endophytes that are compatible to biocides (including herbicides such as glyphosate or anticomplex compounds, whether bacteriostatic or bactericidal) that are agriculturally employed can be isolated using methods similar to those described for isolating compatible endophytes. In one embodiment, mutagenesis of the endophyte population can be performed prior to selection with an anticomplex agent. In another embodiment, selection is performed on the endophyte population without prior mutagenesis. In still another embodiment, serial selection is performed on an endophyte: the endophyte is first selected for compatibility to a first anticomplex agent. The isolated compatible endophyte is then cultured and selected for compatibility to the second anticomplex agent. Any colony thus isolated is tested for compatibility to each, or both anticomplex agents to confirm compatibility with these two agents.

[0229] Compatibility with an antimicrobial agent can be determined by a number of means known in the art, including the comparison of the minimal inhibitory concentration (MIC) of the unmodified and modified endophytes. Therefore, in one embodiment, the present invention discloses an isolated modified endophyte, wherein the endophyte is modified such that it exhibits at least 3 fold greater, for example, at least 5 fold greater, between 5 and 10 fold greater, at least 10 fold greater, between 10 and 20 fold greater, at least 20 fold greater, between 20 and 30 fold greater, at least 30 fold greater or more MIC to an antimicrobial agent when compared with the unmodified endophyte.

[0230] In one embodiment, disclosed herein are endophytes with enhanced compatibility to the herbicide glyphosate. In one embodiment, the endophyte has a doubling time in growth medium comprising at least 1 mM glyphosate, for example, between 1 mM and 2 mM glyphosate, at least 2 mM glyphosate, between 2 mM and 5 mM glyphosate, at least 5 mM glyphosate, between 5 mM and 10 mM glyphosate, at least 10 mM glyphosate, between 10 mM and 15 mM glyphosate, at least 15 mM glyphosate or more, that is no more than 250%, between 250% and 100%, for example, no more than 200%, between 200% and 175%, no more than 175%, between 175% and 150%, no more than 150%, between 150% and 125%, or no more than 125%, of the doubling time of the endophyte in the same growth medium comprising no glyphosate. In one particular embodiment, the endophyte has a doubling time in growth medium comprising 5 mM glyphosate that is no more than 150% the doubling time of the endophyte in the same growth medium comprising no glyphosate.

[0231] In another embodiment, the endophyte has a doubling time in a plant tissue comprising at least 10 ppm glyphosate, between 10 and 15 ppm, for example, at least 15 ppm glyphosate, between 15 and 10 ppm, at least 20 ppm glyphosate, between 20 and 30 ppm, at least 30 ppm glyphosate, between 30 and 40 ppm, at least 40 ppm glyphosate or more, that is no more than 250%, between 250% and 200%, for example, no more than 200%, between 200% and 175%, no more than 175%, between 175% and 150%, no more than 150%, between 150% and 125%, or no more than 125%, of the doubling time of the endophyte in a reference plant tissue comprising no glyphosate. In one particular embodiment, the endophyte has a doubling time in a plant tissue comprising 40 ppm glyphosate that is no more than 150% the doubling time of the endophyte in a reference plant tissue comprising no glyphosate.

[0232] The selection process described above can be repeated to identify isolates of endophytes that are compatible with a multitude of agents.

[0233] Candidate isolates can be tested to ensure that the selection for agrichemical compatibility did not result in loss of a desired bioactivity. Isolates of endophytes that are compatible with commonly employed agents can be selected as described above. The resulting compatible endophyte can be compared with the parental endophyte on plants in its ability to promote germination.

[0234] The agrichemical compatible endophytes generated as described above can be detected in samples. For example, where a transgene was introduced to render the endophyte compatible with the agrichemical(s), the transgene can be used as a target gene for amplification and detection by PCR. In addition, where point mutations or deletions to a portion of a specific gene or a number of genes results in compatibility with the agrichemical(s), the unique point mutations can likewise be detected by PCR or other means known in the art. Such methods allow the detection of the endophyte even if it is no longer viable. Thus, commodity plant products produced using the agrichemical compatible endophytes described herein can readily be identified by employing these and related methods of nucleic acid detection.

### Endophyte Selection: Combinations

[0235] Combinations of endophytes can be selected by any one or more of several criteria. In one embodiment, compatible endophytes are selected. As used herein, “compatibility” refers to endophyte populations that do not significantly interfere with the growth, propagation, and/or production of beneficial substances of the other. Incompatible endophyte populations can arise, for example, where one of the populations produces or secrets a compound that is toxic or deleterious to the growth of the other population(s). Incompatibility arising from production of deleterious compounds/agents can be detected using methods known in the art, and as described herein elsewhere. Similarly, the distinct populations can compete for limited resources in a way that makes co-existence difficult.

[0236] In another embodiment, combinations are selected on the basis of compounds produced by each population of endophytes. For example, the first population is capable of producing siderophores, and another population is capable of producing anti-fungal compounds. In an embodiment, the first population of endophytes or endophytic components is capable of a function selected from the group consisting of auxin production, nitrogen fixation, and production of an antimicrobial compound, siderophore production, mineral phosphate solubilization, cellulase production, chitinase production, xylanase production, and acetoin production, carbon source utilization, and combinations thereof. In another embodiment, the second population of endophytes or endophytic component is capable of a function selected from the group consisting of auxin production, nitrogen fixation, production of an antimicrobial compound, siderophore production, mineral phosphate solubilization, cellulase production, chitinase production, xylanase production, and acetoin production, and combinations thereof. In still another embodiment, the first and second populations are capable of at least one different function.

[0237] In still another embodiment, the combinations of endophytes are selected for their distinct localization in the plant after colonization. For example, the first population of endophytes or endophytic components can colonize, and in some cases preferentially colonize, the root tissue, while a second population can be selected on the basis of its preferential colonization of the aerial parts of the agricultural plant. Therefore, in an embodiment, the first population is capable of colonizing one or more of the tissues selected from the group consisting of a root, shoot, leaf, flower, and seed. In another embodiment, the second population is capable of colonizing one or more tissues selected from the group consisting of root, shoot, leaf, flower, and seed. In still another embodiment, the first and second populations are capable of colonizing a different tissue within the agricultural plant.

[0238] In some embodiments, combinations of endophytes are selected for their ability to confer a benefit to the host plant at different points in the life cycle of said host plant. In one example, one endophyte can be selected to impart improved seedling vigor, and a second endophyte can be selected to improve soil nutrient acquisition by roots of the mature plant.

[0239] In still another embodiment, combinations of endophytes are selected for their ability to confer one or more distinct fitness traits on the inoculated agricultural plant, either individually or in synergistic association with other endophytes. In another embodiment, one endophyte may induce the colonization of a second endophyte. Alternatively, two or more endophytes may induce the colonization of a third endophyte. For example, the first population of endophytes or endophytic components is selected on the basis that it confers significant increase in biomass, while the second population promotes increased drought tolerance on the inoculated agricultural plant. Therefore, in one embodiment, the first population is capable of conferring at least one trait selected from the group consisting of thermal tolerance, herbicide tolerance, drought resistance, insect resistance, fungus resistance, virus resistance, bacteria resistance, male sterility, cold tolerance, salt tolerance, increased yield, enhanced nutrient use efficiency, increased nitrogen use efficiency, increased fermentable carbohydrate content, reduced lignin content, increased antioxidant content, enhanced water use efficiency, increased vigor, increased germination efficiency, earlier or increased flowering, increased biomass, altered root-to-shoot biomass ratio, enhanced soil water retention, or a combination thereof. In another embodiment, the second population is capable of conferring a trait selected from the group consisting of thermal tolerance, herbicide tolerance, drought resistance, insect resistance, fungus resistance, virus resistance, bacteria resistance, male sterility, cold tolerance, salt tolerance, increased yield, enhanced nutrient use efficiency, increased nitrogen use efficiency, increased fermentable carbohydrate content, reduced lignin content, increased antioxidant content, enhanced water use efficiency, increased vigor, increased germination efficiency, earlier or increased flowering, increased biomass, altered root-to-shoot biomass ratio, and enhanced soil water retention. In still another embodiment, each of the first and second population is capable of conferring a different trait selected from the group consisting of thermal tolerance, herbicide tolerance, drought resistance, insect resistance, fungus resistance, virus resistance, bacteria resistance, male sterility, cold tolerance, salt tolerance, increased yield, enhanced nutrient use efficiency, increased nitrogen use efficiency, increased fermentable carbohydrate content, reduced lignin content, increased antioxidant content, enhanced water use efficiency, increased vigor, increased germination efficiency, earlier or increased flowering, increased biomass, altered root-to-shoot biomass ratio, and enhanced soil water retention.

[0240] The combinations of endophytes can also be selected based on combinations of the above criteria. For example, the first population of endophytes can be selected on the basis of the compound it produces (e.g., its ability to fix nitrogen, thus providing a potential nitrogen source to the plant), while the second population can be selected on the basis of its ability to confer increased resistance of the plant to a pathogen (e.g., a fungal pathogen).

[0241] In some embodiments of the present invention, it is contemplated that combinations of endophytes can provide an increased benefit to the host plant, as compared to that conferred by a single endophyte, by virtue of additive effects. For example, one endophyte strain that induces a benefit in the host plant may induce such benefit equally well in a plant that is also colonized with a different endophyte strain that also induces the same benefit in the host plant. The host plant thus exhibits the same total benefit from the combination of different endophyte strains as the additive benefit to individual plants colonized with each individual endophyte of the combination. In one example, a plant is colonized with two different endophyte strains: one provides a 1× increase in biomass when associated with the plant, and the other provides a 2× increase in biomass when associated with a different plant. When both endophyte strains are associated with the same plant, that plant would experience a 3× (additive of 1×+2× single effects) increase in auxin biomass. Additive effects are a surprising embodiment of the present invention.

[0242] In some embodiments of the present invention, it is contemplated that a combination of endophytes can provide an increased benefit to the host plant, as compared to that conferred by a single endophyte, by virtue of synergistic effects. For example, one endophyte strain that induces a benefit in the host plant may induce such benefit beyond additive effects in a plant that is also colonized with a different endophyte strain that also induces that benefit in the host plant. The host plant thus exhibits the greater total benefit from the combination of different endophyte strains than could be seen from the additive benefit of individual plants colonized with each individual endophyte of the combination. In one example, a plant is colonized with two different endophyte strains: one provides a 1× increase in biomass when associated with a plant, and the other provides a 2× increase in biomass when associated with a different plant. When both endophyte strains are associated with the same plant, that plant would experience a 5× (greater than an additive of 1×+2× single effects) increase in biomass. Synergistic effects are a surprising embodiment of the present invention.

### Endophyte Selection: Compositions of the Invention

[0243] In some embodiments, the endophyte is selected from the genus Penicillium. In some embodiments, the endophyte comprises a nucleotide sequence that is at least 97% identical to SEQ ID NO: 1. In some embodiments, the endophyte comprises a nucleotide sequence that is at least 97% identical to SEQ ID NO: 2. In some embodiments, the endophyte comprises a nucleotide sequence that is at least 97% identical to SEQ ID NO: 3. In some embodiments, the endophyte comprises a nucleotide sequence that is at least 97% identical to SEQ ID NO: 4. In some embodiments, the endophyte comprises a nucleotide sequence that is at least 97% identical to SEQ ID NO: 5. In some embodiments, the endophyte comprises a nucleotide sequence that is at least 97% identical to SEQ ID NO: 6. In some embodiments, the endophyte comprises a nucleotide sequence that is at least 97% identical to SEQ ID NO: 7. In some embodiments, the endophyte comprises a nucleotide sequence that is at least 97% identical to SEQ ID NO: 8.

[0244] In some embodiments, the endophyte is at least 97% identical to a sequence selected from the group consisting of SEQ ID NO: 1-SEQ ID NO: 8. In some embodiments, the endophyte is between 97% and 98% identical, at least 98% identical, between 98% identical and 99% identical, or at least 99% identical to a sequence selected from the group consisting of SEQ ID NO: 1-SEQ ID NO: 8.

[0245] In some cases, the endophyte, or one or more components thereof, is of monoclonal origin, providing high genetic uniformity of the endophyte population in an agricultural formulation or within a synthetic plant element or plant combination with the endophyte.

[0246] In some embodiments, the endophyte can be cultured on a culture medium or can be adapted to culture on a culture medium.

[0247] The compositions provided herein are preferably stable. The endophyte may be shelf-stable, where at least 0.01%, of the CFUs are viable after storage in desiccated form (i.e., moisture content of 30% or less) for 1, 2, 3, 4, 5, 6, 7, 8, 9, 10 or greater than 10 weeks at 4° C. or at room temperature. Optionally, a shelf-stable formulation is in a dry formulation, a powder formulation, or a lyophilized formulation. In some embodiments, the formulation is formulated to provide stability for the population of endophytes. In an embodiment, the formulation is substantially stable at temperatures between about −20° C. and about 50° C. for at least about 1, 2, 3, 4, 5, or 6 days, or 1, 2, 3 or 4 weeks, or 1, 2, 3, 4, 5, 6, 7, 8, 9, 10, 11 or 12 months, or one or more years. In another embodiment, the formulation is substantially stable at temperatures between about 4° C. and about 37° C. for at least about 5, 10, 15, 20, 25, 30 or greater than 30 days.

Endophytes and Synthetic Combinations with Plants and Plant Elements

[0248] It is contemplated that the methods and compositions of the present invention may be used to improve any characteristic of any agricultural plant. The methods described herein can also be used with transgenic plants comprising one or more exogenous transgenes, for example, to yield additional trait benefits conferred by the newly introduced endophytic microbes. Therefore, in one embodiment, a plant element of a transgenic soybean plant is contacted with an endophytic microbe. In one embodiment, a plant element of a transgenic maize plant is contacted with an endophytic microbe.

[0249] For example, the endophyte may provide an improved benefit or tolerance to a plant that is of at least 3%, between 3% and 5%, at least 5%, between 5% and 10%, least 10%, between 10% and 15%, for example at least 15%, between 15% and 20%, at least 20%, between 20% and 30%, at least 30%, between 30% and 40%, at least 40%, between 40% and 50%, at least 50%, between 50% and 60%, at least 60%, between 60% and 75%, at least 75%, between 75% and 100%, at least 100%, between 100% and 150%, at least 150%, between 150% and 200%, at least 200%, between 200% and 300%, at least 300% or more, when compared with uninoculated plants grown under the same conditions.

[0250] In one embodiment, it is contemplated that the plant of the present invention is soybean (Glycine max).

[0251] The primary uses for harvested soybean crops include: soybean oil, soybean meal, livestock feed, and uses for human consumption. All parts of a soy plant are utilized, including the starch, flours, oils, and proteins.

[0252] In one embodiment, it is contemplated that the plant of the present invention is maize (corn) (Zea mays).

[0253] The primary uses for harvested maize crops include: livestock feed, food for human consumption, biofuels, high fructose corn syrup, sweeteners, dry distiller grains, plastics, cosmetics, and textiles. All parts of a corn plant are utilized, including the starch, fiber, proteins, and oils.

[0254] The endophyte compositions and methods of the present invention are capable of providing improvements of agronomic interest agricultural plants, for example soybeans and maize.

[0255] In some embodiments, the present invention contemplates the use of endophytes that can confer a beneficial agronomic trait upon the plant element or resulting plant with which it is associated.

[0256] In some cases, the endophytes described herein are capable of moving from one tissue type to another. For example, the present invention's detection and isolation of endophytes within the mature tissues of plants after coating on the exterior of a plant element demonstrates their ability to move from the plant element into the vegetative tissues of a maturing plant. Therefore, in one embodiment, the population of endophytes is capable of moving from the plant element exterior into the vegetative tissues of a plant. In one embodiment, the endophyte that is coated onto the plant element of a plant is capable, upon germination of the plant element into a vegetative state, of localizing to a different tissue of the plant. For example, endophytes can be capable of localizing to any one of the tissues in the plant, including: the root, adventitious root, seminal root, root hair, shoot, leaf, flower, bud, tassel, meristem, pollen, pistil, ovaries, stamen, fruit, stolon, rhizome, nodule, tuber, trichome, guard cells, hydathode, petal, sepal, glume, rachis, vascular cambium, phloem, and xylem. In an embodiment, the endophyte is capable of localizing to the root and/or the root hair of the plant. In another embodiment, the endophyte is capable of localizing to the photosynthetic tissues, for example, leaves and shoots of the plant. In other cases, the endophyte is localized to the vascular tissues of the plant, for example, in the xylem and phloem. In still another embodiment, the endophyte is capable of localizing to the reproductive tissues (flower, pollen, pistil, ovaries, stamen, fruit) of the plant. In another embodiment, the endophyte is capable of localizing to the root, shoots, leaves and reproductive tissues of the plant. In still another embodiment, the endophyte colonizes a fruit or plant element tissue of the plant. In still another embodiment, the endophyte is able to colonize the plant such that it is present in the surface of the plant (i.e., its presence is detectably present on the plant exterior, or the episphere of the plant). In still other embodiments, the endophyte is capable of localizing to substantially all, or all, tissues of the plant. In certain embodiments, the endophyte is not localized to the root of a plant. In other cases, the endophyte is not localized to the photosynthetic tissues of the plant.

[0257] In some cases, endophytes are capable of replicating within the host plant and colonizing the plant.

[0258] As shown in the Examples section below, the endophyte populations described herein are capable of colonizing a host plant. Successful colonization can be confirmed by detecting the presence of the endophyte population within the plant. For example, after applying the fungi to the plant elements, high titers of the fungi can be detected in the roots and shoots of the plants that germinate from the plant elements. Detecting the presence of the endophyte inside the plant can be accomplished by measuring the viability of the endophyte after surface sterilization of the plant element or the plant: endophyte colonization results in an internal localization of the endophyte, rendering it resistant to conditions of surface sterilization. The presence and quantity of endophyte can also be established using other means known in the art, for example, immunofluorescence microscopy using microbe-specific antibodies, or fluorescence in situ hybridization (see, for example, Amann et al. (2001) Current Opinion in Biotechnology 12:231-236, incorporated herein by reference in its entirety). Alternatively, specific nucleic acid probes recognizing conserved sequences from an endophyte can be employed to amplify a region, for example by quantitative PCR, and correlated to CFUs by means of a standard curve.

[0259] In some cases, plants are inoculated with endophytes that are isolated from the same species of plant as the plant element of the inoculated plant. For example, an endophyte that is normally found in one variety of a plant is associated with a plant element of a plant of another variety of that plant that in its natural state lacks said endophyte. For example, an endophyte that is normally found in one variety of Glycine max (soybean) is associated with a plant element of a plant of another variety of Glycine max that in its natural state lacks said endophyte. In an embodiment, the endophyte is obtained from a plant of a related species of plant as the plant element of the inoculated plant. For example, an endophyte that is normally found in one species of a plant is applied to another species of the same genus, or vice versa. In some cases, plants are inoculated with endophytes that are heterologous to the plant element of the inoculated plant. In an embodiment, the endophyte is obtained from a plant of another species. For example, an endophyte that is normally found in dicots is applied to a monocot plant, or vice versa. In other cases, the endophyte to be inoculated onto a plant is obtained from a related species of the plant that is being inoculated. In one embodiment, the endophyte is obtained from a related taxon, for example, from a related species. The plant of another species can be an agricultural plant. In another embodiment, the endophyte is part of a designed composition inoculated into any host plant element.

[0260] In another embodiment, the endophyte is disposed, for example, on the surface of a reproductive element of an agricultural plant, in an amount effective to be detectable in the mature agricultural plant. In one embodiment, the endophyte is disposed in an amount effective to be detectable in an amount of at least about 100 CFU between 100 and 200 CFU, at least about 200 CFU, between 200 and 300 CFU, at least about 300 CFU, between 300 and 400 CFU, at least about 500 CFU, between 500 and 1,000 CFU, at least about 1,000 CFU, between 1,000 and 3,000 CFU, at least about 3,000 CFU, between 3,000 and 10,000 CFU, at least about 10,000 CFU, between 10,000 and 30,000 CFU, at least about 30,000 CFU, between 30,000 and 100,000 CFU, at least about 100,000 CFU or more in the mature agricultural plant.

[0261] In some cases, the endophyte is capable of colonizing particular plant elements or tissue types of the plant. In an embodiment, the endophyte is disposed on the plant element or seedling in an amount effective to be detectable within a target tissue of the mature agricultural plant selected from a fruit, a seed, a leaf, or a root, or portion thereof. For example, the endophyte can be detected in an amount of at least about 100 CFU, at least about 200 CFU, at least about 300 CFU, at least about 500 CFU, at least about 1,000 CFU, at least about 3,000 CFU, at least about 10,000 CFU, at least about 30,000 CFU, at least about 100,000 CFU or more, in the target tissue of the mature agricultural plant.

### Beneficial Attributes of Synthetic Combinations of Plant Elements and Endophytes

### Improved Plant Attributes Conferred by Endophytes

[0262] The present invention contemplates the establishment of a relationship between an endophyte and a plant element. In one embodiment, endophyte association results in a detectable change to the plant element, or the whole plant. The detectable change can be an improvement in a number of agronomic traits (e.g., improved general health, increased response to biotic or abiotic stresses, or enhanced properties of the plant or a plant element, including fruits and grains). Alternatively, the detectable change can be a physiological or biological change that can be measured by methods known in the art. The detectable changes are described in more detail in the sections below. As used herein, an endophyte is considered to have conferred an improved agricultural trait whether or not the improved trait arose from the plant, the endophyte, or the concerted action between the plant and endophyte. Therefore, for example, whether a beneficial hormone or chemical is produced by the plant or the endophyte, for purposes of the present invention, the endophyte will be considered to have conferred an improved agronomic trait upon the host plant, as compared to an isoline plant that has not been associated with said endophyte.

[0263] In some embodiments, provided herein, are methods for producing a plant element of a plant with a heritably altered trait. The trait of the plant can be altered without known genetic modification of the plant genome, and comprises the following steps. First, a preparation of an isolated endophyte that is heterologous to the plant element of the plant is provided, and optionally processed to produce an endophyte formulation. The endophyte formulation is then contacted with the plant. The plants are then allowed to go to seed, and the seeds are collected.

### Improved General Health

[0264] Also described herein are plants, and fields of plants, that are associated with beneficial endophytes, such that the overall fitness, productivity or health of the plant or a portion thereof, is maintained, increased and/or improved over a period of time. Improvement in overall plant health can be assessed using numerous physiological parameters including, but not limited to, height, overall biomass, root and/or shoot biomass, seed germination, seedling survival, photosynthetic efficiency, transpiration rate, seed/fruit number or mass, plant grain or fruit yield, leaf chlorophyll content, photosynthetic rate, root length, or any combination thereof. Improved plant health, or improved field health, can also be demonstrated through improved resistance or response to a given stress, either biotic or abiotic stress, or a combination of one or more abiotic stresses, as provided herein.

### Other Abiotic Stresses

[0265] Disclosed herein are endophyte-associated plants with increased resistance to an abiotic stress. Exemplary abiotic stresses include, but are not limited to: drought, heat, salt content, metal content, low nutrient conditions, cold, excess water conditions.

[0266] Drought and Heat Tolerance.

[0267] In some cases, a plant resulting from seeds or other plant elements treated with an endophyte can exhibit a physiological change, such as a compensation of the stress-induced reduction in photosynthetic activity. Fv/Fm tests whether or not plant stress affects photosystem II in a dark adapted state. Fv/Fm is one of the most commonly used chlorophyll fluorescence measuring parameter. The Fv/Fm test is designed to allow the maximum amount of the light energy to take the fluorescence pathway. It compares the dark-adapted leaf pre-photosynthetic fluorescent state, called minimum fluorescence, or Fo, to maximum fluorescence called Fm. In maximum fluorescence, the maximum number of reaction centers have been reduced or closed by a saturating light source. In general, the greater the plant stress, the fewer open reaction centers available, and the Fv/Fm ratio is lowered. Fv/Fm is a measuring protocol that works for many types of plant stress. For example, there would be a difference in the Fv/Fm after exposure of an endophyte treated plant that had been subjected to heat shock or drought conditions, as compared to a corresponding control, a genetically identical plant that does not contain the endophytes grown in the same conditions. In some cases, the endophyte-associated plant as disclosed herein can exhibit an increased change in photosynthetic activity ΔFv(ΔFv/Fm) after heat-shock or drought stress treatment, for example 1, 2, 3, 4, 5, 6, 7 days or more after the heat-shock or drought stress treatment, or until photosynthesis ceases, as compared with corresponding control plant of similar developmental stage but not comprising endophytes. For example, a plant having an endophyte able to confer heat and/or drought-tolerance can exhibit a ΔFv/Fm of from about 0.1 to about 0.8 after exposure to heat-shock or drought stress or a ΔFv/Fm range of from about 0.03 to about 0.8 under one day, or 1, 2, 3, 4, 5, 6, 7, or over 7 days post heat-shock or drought stress treatment, or until photosynthesis ceases. In some embodiments, stress-induced reductions in photosynthetic activity can be compensated by at least about 0.25% (for example, at least about 0.5%, between 0.5% and 1%, at least about 1%, between 1% and 2%, at least about 2%, between 2% and 3%, at least about 3%, between 3% and 5%, at least about 5%, between 5% and 10%, at least about 8%, at least about 10%, between 10% and 15%, at least about 15%, between 15% and 20%, at least about 20%, between 20$ and 25%, at least about 25%, between 25% and 30%, at least about 30%, between 30% and 40%, at least about 40%, between 40% and 50%, at least about 50%, between 50% and 60%, at least about 60%, between 60% and 75%, at least about 75%, between 75% and 80%, at least about 80%, between 80% and 85%, at least about 85%, between 85% and 90%, at least about 90%, between 90% and 95%, at least about 95%, between 95% and 99%, at least about 99% or at least 100%) as compared to the photosynthetic activity decrease in a corresponding reference agricultural plant following heat shock conditions. Significance of the difference between endophyte-associated and reference agricultural plants can be established upon demonstrating statistical significance, for example at p<0.05 with an appropriate parametric or non-parametric statistic, e.g., Chi-square test, Student's t-test, Mann-Whitney test, or F-test based on the assumption or known facts that the endophyte-associated plant and reference agricultural plant have identical or near identical genomes (isoline comparison).

[0268] In some embodiments, the plants comprise endophytes able to increase heat and/or drought-tolerance in sufficient quantity, such that increased growth or improved recovery from wilting under conditions of heat or drought stress is observed. For example, an endophyte population described herein can be present in sufficient quantity in a plant, resulting in increased growth as compared to a plant that does not contain endophytes, when grown under drought conditions or heat shock conditions, or following such conditions. Increased heat and/or drought tolerance can be assessed with physiological parameters including, but not limited to, increased height, overall biomass, root and/or shoot biomass, seed germination, seedling survival, photosynthetic efficiency, transpiration rate, seed/fruit number or mass, plant grain or fruit yield, leaf chlorophyll content, photosynthetic rate, root length, wilt recovery, turgor pressure, or any combination thereof, as compared to a reference agricultural plant grown under similar conditions. For example, the endophyte may provide an improved benefit or tolerance to a plant that is of at least 3%, between 3% and 5%, at least 5%, between 5% and 10%, least 10%, between 10% and 15%, for example at least 15%, between 15% and 20%, at least 20%, between 20% and 30%, at least 30%, between 30% and 40%, at least 40%, between 40% and 50%, at least 50%, between 50% and 60%, at least 60%, between 60% and 75%, at least 75%, between 75% and 100%, at least 100%, between 100% and 150%, at least 150%, between 150% and 200%, at least 200%, between 200% and 300%, at least 300% or more, when compared with uninoculated plants grown under the same conditions.

[0269] In various embodiments, endophytes introduced into the plant can confer in the resulting plant thermal tolerance, herbicide tolerance, drought resistance, insect resistance, fungus resistance, virus resistance, bacteria resistance, male sterility, cold tolerance, salt tolerance, increased yield, enhanced nutrient use efficiency, increased nitrogen use efficiency, increased protein content, increased fermentable carbohydrate content, reduced lignin content, increased antioxidant content, enhanced water use efficiency, increased vigor, increased germination efficiency, earlier or increased flowering, increased biomass, altered root-to-shoot biomass ratio, enhanced soil water retention, or a combination thereof. A difference between the endophyte-associated plant and a reference agricultural plant can also be measured using other methods known in the art.

[0270] Salt Stress.

[0271] In other embodiments, endophytes able to confer increased tolerance to salinity stress can be introduced into plants. The resulting plants comprising endophytes can exhibit increased resistance to salt stress, whether measured in terms of survival under saline conditions, or overall growth during, or following salt stress. The physiological parameters of plant health recited above, including height, overall biomass, root and/or shoot biomass, seed germination, seedling survival, photosynthetic efficiency, transpiration rate, seed/fruit number or mass, plant grain or fruit yield, leaf chlorophyll content, photosynthetic rate, root length, or any combination thereof, can be used to measure growth, and compared with the growth rate of reference agricultural plants (e.g., isogenic plants without the endophytes) grown under identical conditions. For example, the endophyte may provide an improved benefit or tolerance to a plant that is of at least 10%, between 10% and 15%, for example at least 15%, between 15% and 20%, at least 20%, between 20% and 30%, at least 30%, between 30% and 40%, at least 40%, between 40% and 50%, at least 50%, between 50% and 60%, at least 60%, between 60% and 75%, at least 75%, between 75% and 100%, at least 100%, between 100% and 150%, at least 150%, between 150% and 200%, at least 200%, between 200% and 300%, at least 300% or more, when compared with uninoculated plants grown under the same conditions. In other instances, endophyte-associated plants and reference agricultural plants can be grown in soil or growth media comprising different concentration of sodium to establish the inhibitory concentration of sodium (expressed, for example, as the concentration in which growth of the plant is inhibited by 50% when compared with plants grown under no sodium stress). Therefore, in another embodiment, a plant resulting from plant elements comprising an endophyte able to confer salt tolerance described herein exhibits an increase in the inhibitory sodium concentration by at least 10 mM, between 10 mM and 15 mM, for example at least 15 mM, between 15 mM and 20 mM, at least 20 mM, between 20 mM and 30 mM, at least 30 mM, between 30 mM and 40 mM, at least 40 mM, between 40 mM and 50 mM, at least 50 mM, between 50 mM and 60 mM, at least 60 mM, between 60 mM and 70 mM, at least 70 mM, between 70 mM and 80 mM, at least 80 mM, between 80 mM and 90 mM, at least 90 mM, between 90 mM and 100 mM, at least 100 mM or more, when compared with the reference agricultural plants.

[0272] High Metal Content.

[0273] Plants are sessile organisms and therefore must contend with the environment in which they are placed. Plants have adapted many mechanisms to deal with chemicals and substances that may be deleterious to their health. Heavy metals in particular represent a class of toxins that are highly relevant for plant growth and agriculture, because many of them are associated with fertilizers and sewage sludge used to amend soils and can accumulate to toxic levels in agricultural fields. Therefore, for agricultural purposes, it is important to have plants that are able to tolerate soils comprising elevated levels of toxic heavy metals. Plants cope with toxic levels of heavy metals (for example, nickel, cadmium, lead, mercury, arsenic, or aluminum) in the soil by excretion and internal sequestration. Endophytes that are able to confer increased heavy metal tolerance may do so by enhancing sequestration of the metal in certain compartments away from the seed or fruit and/or by supplementing other nutrients necessary to remediate the stress. Use of such endophytes in a plant would allow the development of novel plant-endophyte combinations for purposes of environmental remediation (also known as phytoremediation). Therefore, in one embodiment, the plant comprising endophytes shows increased metal tolerance as compared to a reference agricultural plant grown under the same heavy metal concentration in the soil.

[0274] Alternatively, the inhibitory concentration of the heavy metal can be determined for endophyte-associated plant and compared with a reference agricultural plant under the same conditions. Therefore, in one embodiment, the plants resulting from plant elements comprising an endophyte able to confer heavy metal tolerance described herein exhibit an increase in the inhibitory metal concentration by at least 0.1 mM, between 0.1 mM and 0.3 mM, for example at least 0.3 mM, between 0.3 mM and 0.5 mM, at least 0.5 mM, between 0.5 mM and 1 mM, at least 1 mM, between 1 mM and 2 mM, at least 2 mM, between 2 mM and 5 mM, at least 5 mM, between 5 mM and 10 mM, at least 10 mM, between 10 mM and 15 mM, at least 15 mM, between 15 mM and 20 mM, at least 20 mM, between 20 mM and 30 mM, at least 30 mM, between 30 mM and 50 mM, at least 50 mM or more, when compared with the reference agricultural plants.

[0275] Finally, plants inoculated with endophytes that are able to confer increased metal tolerance exhibit an increase in overall metal excretion by at least 10%, between 10% and 15%, for example at least 15%, between 15% and 20%, at least 20%, between 20% and 30%, at least 30%, between 30% and 40%, at least 40%, between 40% and 50%, at least 50%, between 50% and 60%, at least 60%, between 60% and 75%, at least 75%, between 75% and 100%, at least 100%, between 100% and 150%, at least 150%, between 150% and 200%, at least 200%, between 200% and 300%, at least 300% or more, when compared with uninoculated plants grown under the same conditions.

[0276] Low Nutrient Stress.

[0277] Endophytes described herein may also confer to the plant an increased ability to grow in nutrient limiting conditions, for example by solubilizing or otherwise making available to the plants macronutrients or micronutrients that are complexed, insoluble, or otherwise in an unavailable form. In one embodiment, a plant is inoculated with an endophyte that confers increased ability to liberate and/or otherwise provide to the plant with nutrients selected from the group consisting of phosphate, nitrogen, potassium, iron, manganese, calcium, molybdenum, vitamins, or other micronutrients. Such a plant can exhibit increased growth in soil comprising limiting amounts of such nutrients when compared with reference agricultural plant. Differences between the endophyte-associated plant and reference agricultural plant can be measured by comparing the biomass of the two plant types grown under limiting conditions, or by measuring the physical parameters described above. Therefore, in one embodiment, the plant comprising endophyte shows increased tolerance to nutrient limiting conditions as compared to a reference agricultural plant grown under the same nutrient limited concentration in the soil, as measured for example by increased biomass or seed yield of at least 10%, between 10% and 15%, for example at least 15%, between 15% and 20%, at least 20%, between 20% and 30%, at least 30%, between 30% and 40%, at least 40%, between 40% and 50%, at least 50%, between 50% and 60%, at least 60%, between 60% and 75%, at least 75%, between 75% and 100%, at least 100%, between 100% and 150%, at least 150%, between 150% and 200%, at least 200%, between 200% and 300%, at least 300% or more, when compared with uninoculated plants grown under the same conditions.

[0278] Cold Stress.

[0279] In some cases, endophytes can confer to the plant the ability to tolerate cold stress. As used herein, cold stress refers to both the stress induced by chilling (0° C.-15° C.) and freezing (<0° C.). Some cultivars of agricultural plants can be particularly sensitive to cold stress, but cold tolerance traits may be multigenic, making the breeding process difficult. Endophytes able to confer cold tolerance can reduce the damage suffered by farmers on an annual basis. Improved response to cold stress can be measured by survival of plants, production of protectant substances such as anthocyanin, the amount of necrosis of parts of the plant, or a change in crop yield loss, as well as the physiological parameters used in other examples. Therefore, in an embodiment, the plant comprising endophytes shows increased cold tolerance exhibits as compared to a reference agricultural plant grown under the same conditions of cold stress. For example, the endophyte may provide an improved benefit or tolerance to a plant that is of at least 3%, between 3% and 5%, at least 5%, between 5% and 10%, least 10%, between 10% and 15%, for example at least 15%, between 15% and 20%, at least 20%, between 20% and 30%, at least 30%, between 30% and 40%, at least 40%, between 40% and 50%, at least 50%, between 50% and 60%, at least 60%, between 60% and 75%, at least 75%, between 75% and 100%, at least 100%, between 100% and 150%, at least 150%, between 150% and 200%, at least 200%, between 200% and 300%, at least 300% or more, when compared with uninoculated plants grown under the same conditions.

[0280] Biotic Stress.

[0281] In other embodiments, the endophyte protects the plant from a biotic stress, for example, insect infestation, nematode infestation, complex infection, fungal infection, bacterial infection, oomycete infection, protozoal infection, viral infection, and herbivore grazing, or a combination thereof. For example, the endophyte may provide an improved benefit or tolerance to a plant that is of at least 3%, between 3% and 5%, at least 5%, between 5% and 10%, least 10%, between 10% and 15%, for example at least 15%, between 15% and 20%, at least 20%, between 20% and 30%, at least 30%, between 30% and 40%, at least 40%, between 40% and 50%, at least 50%, between 50% and 60%, at least 60%, between 60% and 75%, at least 75%, between 75% and 100%, at least 100%, between 100% and 150%, at least 150%, between 150% and 200%, at least 200%, between 200% and 300%, at least 300% or more, when compared with uninoculated plants grown under the same conditions.

[0282] Insect Herbivory.

[0283] There are an abundance of insect pest species that can infect or infest a wide variety of plants. Pest infestation can lead to significant damage. Insect pests that infest plant species are particularly problematic in agriculture as they can cause serious damage to crops and significantly reduce plant yields. A wide variety of different types of plant are susceptible to pest infestation including commercial crops such as cotton, soybean, wheat, barley, and corn (maize).

[0284] In some cases, endophytes described herein may confer upon the host plant the ability to repel insect herbivores. In other cases, endophytes may produce, or induce the production in the plant of, compounds which are insecticidal or insect repellant. The insect may be any one of the common pathogenic insects affecting plants, particularly agricultural plants.

[0285] The endophyte-associated plant can be tested for its ability to resist, or otherwise repel, pathogenic insects by measuring, for example, insect load, overall plant biomass, biomass of the fruit or grain, percentage of intact leaves, or other physiological parameters described herein, and comparing with a reference agricultural plant. In an embodiment, the endophyte-associated plant exhibits increased biomass as compared to a reference agricultural plant grown under the same conditions (e.g., grown side-by-side, or adjacent to, endophyte-associated plants). In other embodiments, the endophyte-associated plant exhibits increased fruit or grain yield as compared to a reference agricultural plant grown under the same conditions (e.g., grown side-by-side, or adjacent to, endophyte-associated plants).

[0286] Nematodes.

[0287] Nematodes are microscopic roundworms that feed on the roots, fluids, leaves and stems of more than 2,000 row crops, vegetables, fruits, and ornamental plants, causing an estimated $100 billion crop loss worldwide and accounting for 13% of global crop losses due to disease. A variety of parasitic nematode species infect crop plants, including root-knot nematodes (RKN), cyst- and lesion-forming nematodes. Root-knot nematodes, which are characterized by causing root gall formation at feeding sites, have a relatively broad host range and are therefore parasitic on a large number of crop species. The cyst- and lesion-forming nematode species have a more limited host range, but still cause considerable losses in susceptible crops.

[0288] Signs of nematode damage include stunting and yellowing of leaves, and wilting of the plants during hot periods. Nematode infestation, however, can cause significant yield losses without any obvious above-ground disease symptoms. The primary causes of yield reduction are due to underground root damage. Roots infected by SCN are dwarfed or stunted. Nematode infestation also can decrease the number of nitrogen-fixing nodules on the roots, and may make the roots more susceptible to attacks by other soil-borne plant nematodes.

[0289] In an embodiment, the endophyte-associated plant has an increased resistance to a nematode when compared with a reference agricultural plant. As before with insect herbivores, biomass of the plant or a portion of the plant, or any of the other physiological parameters mentioned elsewhere, can be compared with the reference agricultural plant grown under the same conditions. Particularly useful measurements include overall plant biomass, biomass and/or size of the fruit or grain, and root biomass. In one embodiment, the endophyte-associated plant exhibits increased biomass as compared to a reference agricultural plant grown under the same conditions (e.g., grown side-by-side, or adjacent to, the endophyte-associated plants, under conditions of nematode challenge). In another embodiment, the endophyte-associated plant exhibits increased root biomass as compared to a reference agricultural plant grown under the same conditions (e.g., grown side-by-side, or adjacent to, the endophyte-associated plants, under conditions of nematode challenge). In still another embodiment, the endophyte-associated plant exhibits increased fruit or grain yield as compared to a reference agricultural plant grown under the same conditions (e.g., grown side-by-side, or adjacent to, the endophyte-associated plants, under conditions of nematode challenge).

[0290] Fungal Pathogens.

[0291] Fungal diseases are responsible for yearly losses of over $10 Billion on agricultural crops in the US, represent 42% of global crop losses due to disease, and are caused by a large variety of biologically diverse pathogens. Different strategies have traditionally been used to control them. Resistance traits have been bred into agriculturally important varieties, thus providing various levels of resistance against either a narrow range of pathogen isolates or races, or against a broader range. However, this involves the long and labor intensive process of introducing desirable traits into commercial lines by genetic crosses and, due to the risk of pests evolving to overcome natural plant resistance, a constant effort to breed new resistance traits into commercial lines is required. Alternatively, fungal diseases have been controlled by the application of chemical fungicides. This strategy usually results in efficient control, but is also associated with the possible development of resistant pathogens and can be associated with a negative impact on the environment. Moreover, in certain crops, such as barley and wheat, the control of fungal pathogens by chemical fungicides is difficult or impractical.

[0292] The present invention contemplates the use of endophytes that are able to confer resistance to fungal pathogens to the host plant. Increased resistance to fungal inoculation can be measured, for example, using any of the physiological parameters presented above, by comparing with reference agricultural plants. In an embodiment, the endophyte-associated plant exhibits increased biomass and/or less pronounced disease symptoms as compared to a reference agricultural plant grown under the same conditions (e.g., grown side-by-side, or adjacent to, the endophyte-associated plants, infected with the fungal pathogen). In still another embodiment, the endophyte-associated plant exhibits increased fruit or grain yield as compared to a reference agricultural plant grown under the same conditions (e.g., grown side-by-side, or adjacent to, the endophyte-associated plants, infected with the fungal pathogen). In another embodiment, the endophyte-associated plant exhibits decreased hyphal growth as compared to a reference agricultural plant grown under the same conditions (e.g., grown side-by-side, or adjacent to, the endophyte-associated plants, infected with the fungal pathogen). For example, the endophyte may provide an improved benefit to a plant that is of at least 3%, between 3% and 5%, at least 5%, between 5% and 10%, least 10%, between 10% and 15%, for example at least 15%, between 15% and 20%, at least 20%, between 20% and 30%, at least 30%, between 30% and 40%, at least 40%, between 40% and 50%, at least 50%, between 50% and 60%, at least 60%, between 60% and 75%, at least 75%, between 75% and 100%, at least 100%, between 100% and 150%, at least 150%, between 150% and 200%, at least 200%, between 200% and 300%, at least 300% or more, when compared with uninoculated plants grown under the same conditions.

[0293] Viral Pathogens.

[0294] Plant viruses are estimated to account for 18% of global crop losses due to disease. There are numerous examples of viral pathogens affecting agricultural productivity. In an embodiment, the endophyte provides protection against viral pathogens such that the plant has increased biomass as compared to a reference agricultural plant grown under the same conditions. In still another embodiment, the endophyte-associated plant exhibits greater fruit or grain yield, when challenged with a virus, as compared to a reference agricultural plant grown under the same conditions. In yet another embodiment, the endophyte-associated plant exhibits lower viral titer, when challenged with a virus, as compared to a reference agricultural plant grown under the same conditions.

[0295] Complex Pathogens.

[0296] Likewise, bacterial pathogens are a significant problem negatively affecting agricultural productivity and accounting for 27% of global crop losses due to plant disease. In an embodiment, the endophyte described herein provides protection against bacterial pathogens such that the plant has greater biomass as compared to a reference agricultural plant grown under the same conditions. In still another embodiment, the endophyte-associated plant exhibits greater fruit or grain yield, when challenged with a complex pathogen, as compared to a reference agricultural plant grown under the same conditions. In yet another embodiment, the endophyte-associated plant exhibits lower complex count, when challenged with a bacterium, as compared to a reference agricultural plant grown under the same conditions.

### Improvement of Other Traits

[0297] In other embodiments, the endophyte can confer other beneficial traits to the plant. Improved traits can include an improved nutritional content of the plant or plant element used for human consumption. In one embodiment, the endophyte-associated plant is able to produce a detectable change in the content of at least one nutrient. Examples of such nutrients include amino acid, protein, oil (including any one of Oleic acid, Linoleic acid, Alpha-linoleic acid, Saturated fatty acids, Palmitic acid, Stearic acid and Trans fats), carbohydrate (including sugars such as sucrose, glucose and fructose, starch, or dietary fiber), Vitamin A, Thiamine (vit. B1), Riboflavin (vit. B2), Niacin (vit. B3), Pantothenic acid (B5), Vitamin B6, Folate (vit. B9), Choline, Vitamin C, Vitamin E, Vitamin K, Calcium, Iron, Magnesium, Manganese, Phosphorus, Potassium, Sodium, Zinc. In an embodiment, the endophyte-associated plant or part thereof contains at least one increased nutrient when compared with reference agricultural plants.

[0298] In other cases, the improved trait can include reduced content of a harmful or undesirable substance when compared with reference agricultural plants. Such compounds include those which are harmful when ingested in large quantities or are bitter tasting (for example, oxalic acid, amygdalin, certain alkaloids such as solanine, caffeine, nicotine, quinine and morphine, tannins, cyanide). As such, in one embodiment, the endophyte-associated plant or part thereof contains less of the undesirable substance when compared with reference agricultural plant. In a related embodiment, the improved trait can include improved taste of the plant or a part of the plant, including the fruit or plant reproductive element. In a related embodiment, the improved trait can include reduction of undesirable compounds produced by other endophytes in plants, such as degradation of Fusarium-produced deoxynivalenol (also known as vomitoxin and a virulence factor involved in Fusarium head blight of maize and wheat) in a part of the plant, including the fruit or plant reproductive element.

[0299] In other cases, the improved trait can be an increase in overall biomass of the plant or a part of the plant, including its fruit or plant reproductive element.

[0300] The endophyte-associated plant can also have an altered hormone status or altered levels of hormone production when compared with a reference agricultural plant. An alteration in hormonal status may affect many physiological parameters, including flowering time, water efficiency, apical dominance and/or lateral shoot branching, increase in root hair, and alteration in fruit ripening.

[0301] The association between the endophyte and the plant can also be detected using other methods known in the art. For example, the biochemical, metabolomics, proteomic, genomic, epigenomic and/or transcriptomic profiles of endophyte-associated plants can be compared with reference agricultural plants under the same conditions.

### Methods of Using Endophytes and Synthetic Combinations Comprising Endophytes

[0302] As described herein, purified endophyte populations and compositions comprising the same (e.g., formulations) can be used to confer beneficial traits to the host plant including, for example, one or more of the following: increased root biomass, increased root length, increased height, increased shoot length, increased leaf number, improved water use efficiency (drought tolerance), increased overall biomass, increase grain yield, increased photosynthesis rate, increased tolerance to drought, increased heat tolerance, increased salt tolerance, increased resistance to nematode stress, increased resistance to a fungal pathogen, increased resistance to a complex pathogen, increased resistance to a viral pathogen, a detectable modulation in the level of a metabolite, and a detectable modulation in the proteome relative to a reference plant. For example, in some embodiments, a purified endophyte population can improve two or more such beneficial traits, e.g., water use efficiency and increased tolerance to drought.

[0303] In some cases, the endophyte may produce one or more compounds and/or have one or more activities, e.g., one or more of the following: production of a metabolite, production of a phytohormone such as auxin, production of acetoin, production of an antimicrobial compound, production of a siderophore, production of a cellulase, production of a pectinase, production of a chitinase, production of a xylanase, nitrogen fixation, or mineral phosphate solubilization. For example, an endophyte can produce a phytohormone selected from the group consisting of an auxin, a cytokinin, a gibberellin, ethylene, a brassinosteroid, and abscisic acid. In one particular embodiment, the endophyte produces auxin (e.g., indole-3-acetic acid (IAA)). Production of auxin can be assayed as described herein. Many of the microbes described herein are capable of producing the plant hormone auxin indole-3-acetic acid (IAA) when grown in culture. Auxin plays a key role in altering the physiology of the plant, including the extent of root growth. Therefore, in another embodiment, the endophytic population is disposed on the surface or within a tissue of the seed or seedling in an amount effective to detectably increase production of auxin in the agricultural plant when compared with a reference agricultural plant. In one embodiment, the increased auxin production can be detected in a tissue type selected from the group consisting of the root, shoot, leaves, and flowers.

[0304] In some embodiments, the endophyte can produce a compound with antimicrobial properties. For example, the compound can have antibacterial properties, as determined by the growth assays provided herein. In one embodiment, the compound with antibacterial properties shows bacteriostatic or bactericidal activity against E. coli and/or Bacillus sp. In another embodiment, the endophyte produces a compound with antifungal properties, for example, fungicidal or fungistatic activity against S. cerevisiae and/or Rhizoctonia.

[0305] In some embodiments, the endophyte is a bacterium capable of nitrogen fixation, and is thus capable of producing ammonium from atmospheric nitrogen. The ability of a bacterium to fix nitrogen can be confirmed by testing for growth of the bacterium in nitrogen-free growth media, for example, LGI media, as described herein.

[0306] In some embodiments, the endophyte can produce a compound that increases the solubility of mineral phosphate in the medium, i.e., mineral phosphate solubilization, for example, using the growth assays described herein. In one embodiment, the endophyte produces a compound that allows the bacterium to grow in growth media comprising Ca₃HPO₄ as the sole phosphate source.

[0307] In some embodiments, the endophyte can produce a siderophore. Siderophores are small high-affinity iron chelating agents secreted by microorganisms that increase the bioavailability of iron. Siderophore production by the endophyte can be detected, for example, using any known method in the art.

[0308] In some embodiments, the endophyte can produce a hydrolytic enzyme. For example, in one embodiment, an endophyte can produce a hydrolytic enzyme selected from the group consisting of a cellulase, a pectinase, a chitinase and a xylanase. Hydrolytic enzymes can be detected using the methods known in the art.

[0309] In some embodiments, metabolites in plants can be modulated by making synthetic combinations of purified endophytic populations. For example, an endophyte described herein can cause a detectable modulation (e.g., an increase or decrease) in the level of various metabolites, e.g., indole-3-carboxylic acid, trans-zeatin, abscisic acid, phaseic acid, indole-3-acetic acid, indole-3-butyric acid, indole-3-acrylic acid, jasmonic acid, jasmonic acid methyl ester, dihydrophaseic acid, gibberellin A3, salicylic acid, upon colonization of a plant.

[0310] In some embodiments, the endophyte modulates the level of the metabolite directly (e.g., the microbe itself produces the metabolite, resulting in an overall increase in the level of the metabolite found in the plant). In other cases, the agricultural plant, as a result of the association with the endophytic microbe (e.g., an endophyte), exhibits a modulated level of the metabolite (e.g., the plant reduces the expression of a biosynthetic enzyme responsible for production of the metabolite as a result of the microbe inoculation). In still other cases, the modulation in the level of the metabolite is a consequence of the activity of both the microbe and the plant (e.g., the plant produces increased amounts of the metabolite when compared with a reference agricultural plant, and the endophytic microbe also produces the metabolite). Therefore, as used herein, a modulation in the level of a metabolite can be an alteration in the metabolite level through the actions of the microbe and/or the inoculated plant.

[0311] The levels of a metabolite can be measured in an agricultural plant, and compared with the levels of the metabolite in a reference agricultural plant, and grown under the same conditions as the inoculated plant. The uninoculated plant that is used as a reference agricultural plant is a plant that has not been applied with a formulation with the endophytic microbe (e.g., a formulation comprising a population of purified endophytes). The uninoculated plant used as the reference agricultural plant is generally the same species and cultivar as, and is isogenic to, the inoculated plant.

[0312] The metabolite whose levels are modulated (e.g., increased or decreased) in the endophyte-associated plant may serve as a primary nutrient (i.e., it provides nutrition for the humans and/or animals who consume the plant, plant tissue, or the commodity plant product derived therefrom, including, but not limited to, a sugar, a starch, a carbohydrate, a protein, an oil, a fatty acid, a mineral, or a vitamin). The metabolite can be a compound that is important for plant growth, development or homeostasis (for example, a phytohormone such as an auxin, cytokinin, gibberellin, a brassinosteroid, ethylene, or abscisic acid, a signaling molecule, or an antioxidant). In other embodiments, the metabolite can have other functions. For example, in one embodiment, a metabolite can have bacteriostatic, bactericidal, fungistatic, fungicidal or antiviral properties. In other embodiments, the metabolite can have insect-repelling, insecticidal, nematode-repelling, or nematicidal properties. In still other embodiments, the metabolite can serve a role in protecting the plant from stresses, may help improve plant vigor or the general health of the plant. In yet another embodiment, the metabolite can be a useful compound for industrial production. For example, the metabolite may itself be a useful compound that is extracted for industrial use, or serve as an intermediate for the synthesis of other compounds used in industry. In a particular embodiment, the level of the metabolite is increased within the agricultural plant or a portion thereof such that it is present at a concentration of at least 0.1 ug/g dry weight, between 0.1 ug/g to 0.3 ug/g, for example, at least 0.3 ug/g dry weight, between 0.3 ug/g to 1.0 ug/g, 1.0 ug/g dry weight, between 1 ug/g and 3 ug/g, 3.0 ug/g dry weight, between 3 ug/g and 10 ug/g, 10 ug/g dry weight, between 10 ug/g and 30 ug/g, 30 ug/g dry weight, between 30 ug/g and 100 ug/g, 100 ug/g dry weight, between 100 ug/g and 300 ug/g, 300 ug/g dry weight, between 300 ug/g and 1 mg/g, 1 mg/g dry weight, between 1 mg/g and 3 mg/g, 3 mg/g dry weight, between 3 mg/g and 10 mg/g, 10 mg/g dry weight, between 10 mg/g and 30 mg/g, 30 mg/g dry weight, between 30 mg/g and 100 mg/g, 100 mg/g dry weight or more, of the plant or portion thereof.

[0313] Likewise, the modulation can be a decrease in the level of a metabolite. The reduction can be in a metabolite affecting the taste of a plant or a commodity plant product derived from a plant (for example, a bitter tasting compound), or in a metabolite which makes a plant or the resulting commodity plant product otherwise less valuable (for example, reduction of oxalate content in certain plants, or compounds which are deleterious to human and/or animal health). The metabolite whose level is to be reduced can be a compound that affects quality of a commodity plant product (e.g., reduction of lignin levels).

[0314] In some embodiments, the endophyte is capable of generating a complex network in the plant or surrounding environment of the plant, which network is capable of causing a detectable modulation in the level of a metabolite in the host plant.

[0315] In a particular embodiment, the metabolite can serve as a signaling or regulatory molecule. The signaling pathway can be associated with a response to a stress, for example, one of the stress conditions selected from the group consisting of drought stress, salt stress, heat stress, cold stress, low nutrient stress, nematode stress, insect herbivory stress, fungal pathogen stress, complex pathogen stress, and viral pathogen stress.

[0316] The inoculated agricultural plant is grown under conditions such that the level of one or more metabolites is modulated in the plant, wherein the modulation is indicative of increased resistance to a stress selected from the group consisting of drought stress, salt stress, heat stress, cold stress, low nutrient stress, nematode stress, insect herbivory stress, fungal pathogen stress, complex pathogen stress, and viral pathogen stress. The increased resistance can be measured at about 10 minutes after applying the stress, between 10 minutes and 20 minutes, for example about 20 minutes, between 20 and 30 minutes, 30 minutes, between 30 and 45 minutes, about 45 minutes, between 45 minutes and 1 hour, about 1 hour, between 1 and 2 hours, about 2 hours, between 2 and 4 hours, about 4 hours, between 4 and 8 hours, about 8 hours, between 8 and 12 hours, about 12 hours, between 12 and 16 hours, about 16 hours, between 16 and 20 hours, about 20 hours, between 20 and 24 hours, about 24 hours, between 24 and 36 hours, about 36 hours, between 36 and 48 hours, about 48 hours, between 48 and 72 hours, about 72 hours, between 72 and 96 hours, about 96 hours, between 96 and 120 hours, about 120 hours, between 120 hours and one week, or about a week after applying the stress.

[0317] The metabolites or other compounds described herein can be detected using any suitable method including, but not limited to gel electrophoresis, liquid and gas phase chromatography, either alone or coupled to mass spectrometry, NMR, immunoassays (radioimmunoassays (MA) or enzyme-linked immunosorbent assays (ELISA)), chemical assays, spectroscopy and the like. In some embodiments, commercial systems for chromatography and NMR analysis are utilized.

[0318] In other embodiments, metabolites or other compounds are detected using optical imaging techniques such as magnetic resonance spectroscopy (MRS), magnetic resonance imaging (MRI), CAT scans, ultra sound, MS-based tissue imaging or X-ray detection methods (e.g., energy dispersive x-ray fluorescence detection).

[0319] Any suitable method may be used to analyze the biological sample (e.g., seed or plant tissue) in order to determine the presence, absence or level(s) of the one or more metabolites or other compounds in the sample. Suitable methods include chromatography (e.g., HPLC, gas chromatography, liquid chromatography), mass spectrometry (e.g., MS, MS-MS), LC-MS, enzyme-linked immunosorbent assay (ELISA), antibody linkage, other immunochemical techniques, biochemical or enzymatic reactions or assays, and combinations thereof. The levels of one or more of the recited metabolites or compounds may be determined in the methods of the present invention. For example, the level(s) of one metabolites or compounds, two or more metabolites, three or more metabolites, four or more metabolites, five or more metabolites, six or more metabolites, seven or more metabolites, eight or more metabolites, nine or more metabolites, ten or more metabolites, or compounds etc., including a combination of some or all of the metabolites or compounds including, but not limited to those disclosed herein may be determined and used in such methods.

[0320] In some embodiments, a synthetic combination of a plant and a formulation comprising at least one endophytic microbe will cause an increase in the level of a protein in the plant.

[0321] In some embodiments, a synthetic combination of a plant and a formulation comprising at least one endophytic microbe will cause a decrease in the level of a protein in the plant.

[0322] In some embodiments, a synthetic combination of a plant and a formulation comprising at least one endophytic microbe will cause an increase in the level of expression of a gene in the plant.

[0323] In some embodiments, a synthetic combination of a plant and a formulation comprising at least one endophytic microbe will cause a decrease in the level of expression of a gene in the plant.

[0324] In some embodiments, a synthetic combination of a plant and a formulation comprising at least one endophytic microbe will cause an increase in the level of a plant hormone.

[0325] In some embodiments, a synthetic combination of a plant and a formulation comprising at least one endophytic microbe will cause a modulation in the concentration or amount of a metabolite.

[0326] As shown in the Examples and otherwise herein, endophyte-inoculated plants display increased thermal tolerance, herbicide tolerance, drought resistance, insect resistance, fungus resistance, virus resistance, bacteria resistance, male sterility, cold tolerance, salt tolerance, increased yield, enhanced nutrient use efficiency, increased nitrogen use efficiency, increased protein content, increased fermentable carbohydrate content, reduced lignin content, increased antioxidant content, enhanced water use efficiency, increased vigor, increased germination efficiency, earlier or increased flowering, increased biomass, altered root-to-shoot biomass ratio, enhanced soil water retention, or a combination thereof.

[0327] Therefore, in an embodiment, the endophytic population is disposed on the surface or on or within a tissue of the seed or seedling in an amount effective to increase the biomass of the plant, or a part or tissue of the plant derived from the seed or seedling. The increased biomass is useful in the production of commodity products derived from the plant. Such commodity products include an animal feed, a fish fodder, a cereal product, a processed human-food product, a sugar or an alcohol. Such products may be a fermentation product or a fermentable product, one such exemplary product is a biofuel. The increase in biomass can occur in a part of the plant (e.g., the root tissue, shoots, leaves, etc.), or can be an increase in overall biomass when compared with a reference agricultural plant. Such increase in overall biomass can be under relatively stress-free conditions. In other cases, the increase in biomass can be in plants grown under any number of abiotic or biotic stresses, including drought stress, salt stress, heat stress, cold stress, low nutrient stress, nematode stress, insect herbivory stress, fungal pathogen stress, complex pathogen stress, and viral pathogen stress.

[0328] In another embodiment, the endophytic population is disposed on the surface or within a tissue of the seed or seedling in an amount effective to increase the rate of seed germination when compared with a reference agricultural plant.

[0329] In other cases, the microbe is disposed on the seed or seedling in an amount effective to increase the average biomass of the fruit or cob from the resulting plant when compared with a reference agricultural plant.

[0330] Plants inoculated with an endophytic population may also show an increase in overall plant height. Therefore, in an embodiment, the present invention provides for a seed comprising an endophytic population that is disposed on the surface or within a tissue of the seed or seedling in an amount effective to increase the height of the plant. For example, the endophytic population is disposed in an amount effective to result in an increase in height of the agricultural plant when compared with a reference agricultural plant. Such an increase in height can be under relatively stress-free conditions. In other cases, the increase in height can be in plants grown under any number of abiotic or biotic stresses, including drought stress, salt stress, heat stress, cold stress, low nutrient stress, nematode stress, insect herbivory stress, fungal pathogen stress, complex pathogen stress, or viral pathogen stress.

[0331] In another embodiment, the plant containing the endophyte is able to grown under nutrient stress conditions while exhibiting no difference in the physiological parameter compared to a plant that is grown without nutrient stress. In some embodiments, such a plant will exhibit no difference in the physiological parameter when grown with 2-5% less nitrogen than average cultivation practices on normal agricultural land, for example, at least 5-10% less nitrogen, at least 10-15% less nitrogen, at least 15-20% less nitrogen, at least 20-25% less nitrogen, at least 25-30% less nitrogen, at least 30-35% less nitrogen, at least 35-40% less nitrogen, at least 40-45% less nitrogen, at least 45-50% less nitrogen, at least 50-55% less nitrogen, at least 55-60% less nitrogen, at least 60-65% less nitrogen, at least 65-70% less nitrogen, at least 70-75% less nitrogen, at least 80-85% less nitrogen, at least 85-90% less nitrogen, at least 90-95% less nitrogen, or less, when compared with crop plants grown under normal conditions during an average growing season. In some embodiments, the microbe capable of providing nitrogen-stress tolerance to a plant is diazotrophic. In other embodiments, the microbe capable of providing nitrogen-stress tolerance to a plant is non-diazotrophic.

[0332] The host plants inoculated with the endophytic population may also show improvements in their ability to utilize water more efficiently. Water use efficiency is a parameter often correlated with drought tolerance. Water use efficiency (WUE) is a parameter often correlated with drought tolerance, and is the CO₂ assimilation rate per amount of water transpired by the plant. An increase in biomass at low water availability may be due to relatively improved efficiency of growth or reduced water consumption. In selecting traits for improving crops, a decrease in water use, without a change in growth would have particular merit in an irrigated agricultural system where the water input costs were high. An increase in growth without a corresponding jump in water use would have applicability to all agricultural systems. In many agricultural systems where water supply is not limiting, an increase in growth, even if it came at the expense of an increase in water use also increases yield.

[0333] When soil water is depleted or if water is not available during periods of drought, crop yields are restricted. Plant water deficit develops if transpiration from leaves exceeds the supply of water from the roots. The available water supply is related to the amount of water held in the soil and the ability of the plant to reach that water with its root system. Transpiration of water from leaves is linked to the fixation of carbon dioxide by photosynthesis through the stomata. The two processes are positively correlated so that high carbon dioxide influx through photosynthesis is closely linked to water loss by transpiration. As water transpires from the leaf, leaf water potential is reduced and the stomata tend to close in a hydraulic process limiting the amount of photosynthesis. Since crop yield is dependent on the fixation of carbon dioxide in photosynthesis, water uptake and transpiration are contributing factors to crop yield. Plants which are able to use less water to fix the same amount of carbon dioxide or which are able to function normally at a low water potential, are more efficient and thereby are able to produce more biomass and economic yield in many agricultural systems. An increased water use efficiency of the plant relates in some cases to an increased fruit/kernel size or number.

[0334] Therefore, in one embodiment, the plants described herein exhibit an increased water use efficiency (WUE) when compared with a reference agricultural plant grown under the same conditions. For example, the endophyte may provide an increase in WUE to a plant that is of at least 3%, between 3% and 5%, at least 5%, between 5% and 10%, least 10%, between 10% and 15%, for example at least 15%, between 15% and 20%, at least 20%, between 20% and 30%, at least 30%, between 30% and 40%, at least 40%, between 40% and 50%, at least 50%, between 50% and 60%, at least 60%, between 60% and 75%, at least 75%, between 75% and 100%, at least 100%, between 100% and 150%, at least 150%, between 150% and 200%, at least 200%, between 200% and 300%, at least 300% or more, when compared with uninoculated plants grown under the same conditions. Such an increase in WUE can occur under conditions without water deficit, or under conditions of water deficit, for example, when the soil water content is less than or equal to 60% of water saturated soil, for example, less than or equal to 50%, less than or equal to 40%, less than or equal to 30%, less than or equal to 20%, less than or equal to 10% of water saturated soil on a weight basis. In some embodiments, the plants inoculated with the endophytic population show increased yield under non-irrigated conditions, as compared to reference agricultural plants grown under the same conditions.

[0335] In a related embodiment, the plant comprising endophyte can have a higher relative water content (RWC), than a reference agricultural plant grown under the same conditions. Formulations for Agricultural Use

[0336] The endophyte populations described herein are intended to be useful in the improvement of agricultural plants, and as such, may be formulated with other compositions as part of an agriculturally compatible carrier. It is contemplated that such carriers can include applications such as, but not be limited to: seed treatment, root wash, seedling soak, foliar application, soil inocula, in-furrow application, sidedress application, soil pre-treatment, wound inoculation, drip tape irrigation, vector-mediation via a pollinator, injection, osmopriming, hydroponics, aquaponics, aeroponics. The carrier composition with the endophyte populations, may be prepared for agricultural application as a liquid, a solid, or a gas formulation. Application to the plant may be achieved, for example, as a powder for surface deposition onto plant leaves, as a spray to the whole plant or selected plant element, as part of a drip to the soil or the roots, or as a coating onto the plant element prior to planting. Such examples are meant to be illustrative and not limiting to the scope of the invention.

[0337] The formulation useful for these embodiments generally and typically include at least one member selected from the group consisting of a buffer, a tackifier, a microbial stabilizer, a fungicide, an anticomplex agent, an herbicide, a nematicide, an insecticide, a bactericide, a virucide, a plant growth regulator, a rodenticide, a desiccant, and a nutrient.

[0338] The carrier can be a solid carrier or liquid carrier, and in various forms including microspheres, powders, emulsions and the like. The carrier may be any one or more of a number of carriers that confer a variety of properties, such as increased stability, wettability, or dispersability. Wetting agents such as natural or synthetic surfactants, which can be nonionic or ionic surfactants, or a combination thereof can be included in a composition of the invention. Water-in-oil emulsions can also be used to formulate a composition that includes the purified population (see, for example, U.S. Pat. No. 7,485,451, which is incorporated herein by reference in its entirety). Suitable formulations that may be prepared include wettable powders, granules, gels, agar strips or pellets, thickeners, biopolymers, and the like, microencapsulated particles, and the like, liquids such as aqueous flowables, aqueous suspensions, water-in-oil emulsions, etc. The formulation may include grain or legume products, for example, ground grain or beans, broth or flour derived from grain or beans, starch, sugar, or oil.

[0339] In some embodiments, the agricultural carrier may be soil or a plant growth medium. Other agricultural carriers that may be used include water, fertilizers, plant-based oils, humectants, or combinations thereof. Alternatively, the agricultural carrier may be a solid, such as diatomaceous earth, loam, silica, alginate, clay, bentonite, vermiculite, seed cases, other plant and animal products, or combinations, including granules, pellets, or suspensions. Mixtures of any of the aforementioned ingredients are also contemplated as carriers, such as but not limited to, pesta (flour and kaolin clay), agar or flour-based pellets in loam, sand, or clay, etc. Formulations may include food sources for the cultured organisms, such as barley, rice, or other biological materials such as seed, plant elements, sugar cane bagasse, hulls or stalks from grain processing, ground plant material or wood from building site refuse, sawdust or small fibers from recycling of paper, fabric, or wood. Other suitable formulations will be known to those skilled in the art.

[0340] In an embodiment, the formulation can include a tackifier or adherent. Such agents are useful for combining the complex population of the invention with carriers that can contain other compounds (e.g., control agents that are not biologic), to yield a coating composition. Such compositions help create coatings around the plant or plant element to maintain contact between the endophyte and other agents with the plant or plant element. In one embodiment, adherents are selected from the group consisting of: alginate, gums, starches, lecithins, formononetin, polyvinyl alcohol, alkali formononetinate, hesperetin, polyvinyl acetate, cephalins, Gum Arabic, Xanthan Gum, carragennan, PGA, other biopolymers, Mineral Oil, Polyethylene Glycol (PEG), Polyvinyl pyrrolidone (PVP), Arabino-galactan, Methyl Cellulose, PEG 400, Chitosan, Polyacrylamide, Polyacrylate, Polyacrylonitrile, Glycerol, Triethylene glycol, Vinyl Acetate, Gellan Gum, Polystyrene, Polyvinyl, Carboxymethyl cellulose, Gum Ghatti, and polyoxyethylene-polyoxybutylene block copolymers. Other examples of adherent compositions that can be used in the synthetic preparation include those described in EP 0818135, CA 1229497, WO 2013090628, EP 0192342, WO 2008103422 and CA 1041788, each of which is incorporated herein by reference in its entirety.

[0341] It is also contemplated that the formulation may further comprise an anti-caking agent.

[0342] The formulation can also contain a surfactant, wetting agent, emulsifier, stabilizer, or anti-foaming agent. Non-limiting examples of surfactants include nitrogen-surfactant blends such as Prefer 28 (Cenex), Surf-N(US), Inhance (Brandt), P-28 (Wilfarm) and Patrol (Helena); esterified seed oils include Sun-It II (AmCy), MSO (UAP), Scoil (Agsco), Hasten (Wilfarm) and Mes-100 (Drexel); and organo-silicone surfactants include Silwet L77 (UAP), Silikin (Terra), Dyne-Amic (Helena), Kinetic (Helena), Sylgard 309 (Wilbur-Ellis) and Century (Precision), polysorbate 20, polysorbate 80, Tween 20, Tween 80, Scattics, Alktest TW20, Canarcel, Peogabsorb 80, Triton X-100, Conco NI, Dowfax 9N, Igebapl CO, Makon, Neutronyx 600, Nonipol NO, Plytergent B, Renex 600, Solar NO, Sterox, Serfonic N, T-DET-N, Tergitol NP, Triton N, IGEPAL CA-630, Nonident P-40, Pluronic. In one embodiment, the surfactant is present at a concentration of between 0.01% v/v to 10% v/v. In another embodiment, the surfactant is present at a concentration of between 0.1% v/v to 1% v/v. An example of an anti-foaming agent would be Antifoam-C.

[0343] In certain cases, the formulation includes a microbial stabilizer. Such an agent can include a desiccant. As used herein, a “desiccant” can include any compound or mixture of compounds that can be classified as a desiccant regardless of whether the compound or compounds are used in such concentrations that they in fact have a desiccating effect on the liquid inoculant. Such desiccants are ideally compatible with the population used, and should promote the ability of the endophyte population to survive application on the seeds and to survive desiccation. Examples of suitable desiccants include one or more of trehalose, sucrose, glycerol, and methylene glycol. Other suitable desiccants include, but are not limited to, non reducing sugars and sugar alcohols (e.g., mannitol or sorbitol). The amount of desiccant introduced into the formulation can range from about 5% to about 50% by weight/volume, for example, between about 10% to about 40%, between about 15% and about 35%, or between about 20% and about 30%.

[0344] In some cases, it is advantageous for the formulation to contain agents such as a fungicide, an anticomplex agent, an herbicide, a nematicide, an insecticide, a plant growth regulator, a rodenticide, a bactericide, a virucide, or a nutrient. Such agents are ideally compatible with the agricultural plant element or seedling onto which the formulation is applied (e.g., it should not be deleterious to the growth or health of the plant). Furthermore, the agent is ideally one which does not cause safety concerns for human, animal or industrial use (e.g., no safety issues, or the compound is sufficiently labile that the commodity plant product derived from the plant contains negligible amounts of the compound).

[0345] In the liquid form, for example, solutions or suspensions, endophyte populations of the present invention can be mixed or suspended in water or in aqueous solutions. Suitable liquid diluents or carriers include water, aqueous solutions, petroleum distillates, or other liquid carriers.

[0346] Solid compositions can be prepared by dispersing the endophyte populations of the invention in and on an appropriately divided solid carrier, such as peat, wheat, bran, vermiculite, clay, talc, bentonite, diatomaceous earth, fuller's earth, pasteurized soil, and the like. When such formulations are used as wettable powders, biologically compatible dispersing agents such as non-ionic, anionic, amphoteric, or cationic dispersing and emulsifying agents can be used.

[0347] The solid carriers used upon formulation include, for example, mineral carriers such as kaolin clay, pyrophyllite, bentonite, montmorillonite, diatomaceous earth, acid white soil, vermiculite, and pearlite, and inorganic salts such as ammonium sulfate, ammonium phosphate, ammonium nitrate, urea, ammonium chloride, and calcium carbonate. Also, organic fine powders such as wheat flour, wheat bran, and rice bran may be used. The liquid carriers include vegetable oils (such as soybean oil, maize (corn) oil, and cottonseed oil), glycerol, ethylene glycol, polyethylene glycol, propylene glycol, polypropylene glycol, etc.

[0348] In an embodiment, the formulation is ideally suited for coating of a population of endophytes onto plant elements. The endophytes populations described in the present invention are capable of conferring many fitness benefits to the host plants. The ability to confer such benefits by coating the populations on the surface of plant elements has many potential advantages, particularly when used in a commercial (agricultural) scale.

[0349] The endophyte populations herein can be combined with one or more of the agents described above to yield a formulation suitable for combining with an agricultural plant element, seedling, or other plant element. Endophyte populations can be obtained from growth in culture, for example, using a synthetic growth medium. In addition, endophytes can be cultured on solid media, for example on petri dishes, scraped off and suspended into the preparation. Endophytes at different growth phases can be used. For example, endophytes at lag phase, early-log phase, mid-log phase, late-log phase, stationary phase, early death phase, or death phase can be used. Endophytic spores may be used for the present invention, for example but not limited to: arthospores, sporangispores, conidia, chlamadospores, pycnidiospores, endospores, zoospores.

[0350] The formulations comprising endophyte populations of the present invention typically contains between about 0.1 to 95% by weight, for example, between about 1% and 90%, between about 3% and 75%, between about 5% and 60%, between about 10% and 50% in wet weight of the population of the present invention. It is preferred that the formulation contains at least about 10̂3 CFU per ml of formulation, for example, at least about 10̂4, at least about 10̂5, at least about 10̂6, at least about 10̂7 CFU, at least about 10̂8 CFU per ml of formulation. It is preferred that the formulation be applied to the plant element at about 10̂2 CFU/seed, between 10̂2 and 10̂3 CFU, at least about 10̂3 CFU, between 10̂3 and 10̂4 CFU, at least about 10̂4 CFU, between 10̂4 and 10̂5 CFU, at least about 10̂5 CFU, between 10̂5 and 10̂6 CFU, at least about 10̂6 CFU, between 10̂6 and 10̂7 CFU, at least about 10̂7 CFU, between 10̂7 and 10̂8 CFU, or even greater than 10̂8 CFU per seed.

[0351] In some embodiments, fungal endophytes may be encapsulated in a fungal host, whether its native host or a heterologous host, before incorporation into a formulation.

### Populations of Plant Elements (PEs)

[0352] In another embodiment, the invention provides for a substantially uniform population of plant elements (PEs) comprising two or more PEs comprising the endophytic population, as described herein above. Substantial uniformity can be determined in many ways. In some cases, at least 10%, between 10% and 20%, for example, at least 20%, between 20% and 30%, at least 30%, between 30% and 40%, at least 40%, between 40% and 50%, at least 50%, between 50% and 60%, at least 60%, between 60% and 70%, at least 70%, between 70% and 75%, at least 75%, between 75% and 80%, at least 80%, between 80% and 90%, at least 90%, between 90% and 95%, at least 95% or more of the PEs in the population, contains the endophytic population in an amount effective to colonize the plant disposed on the surface of the PEs. In other cases, at least 10%, between 10% and 20%, for example, at least 20%, between 20% and 30%, at least 30%, between 30% and 40%, at least 40%, between 40% and 50%, at least 50%, between 50% and 60%, at least 60%, between 60% and 70%, at least 70%, between 70% and 75%, at least 75%, between 75% and 80%, at least 80%, between 80% and 90%, at least 90%, between 90% and 95%, at least 95% or more of the plant element s in the population, contains at least 1, between 10 and 10, 10, between 10 and 100, or 100 CFU on the plant element surface or per gram of plant element, for example, between 100 and 200 CFU, at least 200 CFU, between 200 and 300 CFU, at least 300 CFU, between 300 and 1,000 CFU, at least 1,000 CFU, between 1,000 and 3,000 CFU, at least 3,000 CFU, between 3,000 and 10,000 CFU, at least 10,000 CFU, between 10,000 and 30,000 CFU, at least 30,000 CFU, between 30,000 and 100,000 CFU, at least 100,000 CFU, between 100,000 and 300,000 CFU, at least 300,000 CFU, between 300,000 and 1,000,000 CFU, or at least 1,000,000 CFU per plant element or more.

[0353] In a particular embodiment, the population of plant elements is packaged in a bag or container suitable for commercial sale. Such a bag contains a unit weight or count of the plant elements comprising the endophytic population as described herein, and further comprises a label. In an embodiment, the bag or container contains at least 100 plant elements, between 100 and 1,000 plant elements, 1,000 plant elements, between 1,000 and 5,000 plant elements, for example, at least 5,000 plant elements, between 5,000 and 10,000 plant elements, at least 10,000 plant elements, between 10,000 and 20,000 plant elements, at least 20,000 plant elements, between 20,000 and 30,000 plant elements, at least 30,000 plant elements, between 30,000 and 50,000 plant elements, at least 50,000 plant elements, between 50,000 and 70,000 plant elements, at least 70,000 plant elements, between 70,000 and 80,000 plant elements, at least 80,000 plant elements, between 80,000 and 90,000, at least 90,000 plant elements or more. In another embodiment, the bag or container can comprise a discrete weight of plant elements, for example, at least 1 lb, between 1 and 2 lbs, at least 2 lbs, between 2 and 5 lbs, at least 5 lbs, between 5 and 10 lbs, at least 10 lbs, between 10 and 30 lbs, at least 30 lbs, between 30 and 50 lbs, at least 50 lbs, between 50 and 70 lmbs, at least 70 lbs or more. The bag or container comprises a label describing the plant elements and/or said endophytic population. The label can contain additional information, for example, the information selected from the group consisting of: net weight, lot number, geographic origin of the plant elements, test date, germination rate, inert matter content, and the amount of noxious weeds, if any. Suitable containers or packages include those traditionally used in plant seed commercialization. The invention also contemplates other containers with more sophisticated storage capabilities (e.g., with microbiologically tight wrappings or with gas- or water-proof containments).

[0354] In some cases, a sub-population of seeds comprising the endophytic population is further selected on the basis of increased uniformity, for example, on the basis of uniformity of microbial population. For example, individual plant elements of pools collected from individual cobs, individual plants, individual plots (representing plants inoculated on the same day) or individual fields can be tested for uniformity of microbial density, and only those pools meeting specifications (e.g., at least 80% of tested plant elements have minimum density, as determined by quantitative methods described elsewhere) are combined to provide the agricultural seed sub-population.

[0355] The methods described herein can also comprise a validating step. The validating step can entail, for example, growing some plant elements collected from the inoculated plants into mature agricultural plants, and testing those individual plants for uniformity. Such validating step can be performed on individual seeds collected from cobs, individual plants, individual plots (representing plants inoculated on the same day) or individual fields, and tested as described above to identify pools meeting the required specifications.

[0356] In some embodiments, methods described herein include planting a synthetic combination described herein. Suitable planters include an air seeder and/or fertilizer apparatus used in agricultural operations to apply particulate materials including one or more of the following, seed, fertilizer and/or inoculants, into soil during the planting operation. Seeder/fertilizer devices can include a tool bar having ground-engaging openers thereon, behind which is towed a wheeled cart that includes one or more containment tanks or bins and associated metering means to respectively contain and meter therefrom particulate materials.

[0357] In certain embodiments, a composition described herein may be in the form of a liquid, a slurry, a solid, or a powder (wettable powder or dry powder). In another embodiment, a composition may be in the form of a seed coating. Compositions in liquid, slurry, or powder (e.g., wettable powder) form may be suitable for coating plant elements. When used to coat plant elements, the composition may be applied to the plant elements and allowed to dry. In embodiments wherein the composition is a powder (e.g., a wettable powder), a liquid, such as water, may need to be added to the powder before application to a seed.

[0358] In still another embodiment, the methods can include introducing into the soil an inoculum of one or more of the endophyte populations described herein. Such methods can include introducing into the soil one or more of the compositions described herein. The inoculum(s) or compositions may be introduced into the soil according to methods known to those skilled in the art. Non-limiting examples include in-furrow introduction, spraying, coating seeds, foliar introduction, etc. In a particular embodiment, the introducing step comprises in-furrow introduction of the inoculum or compositions described herein.

[0359] In an embodiment, plant elements may be treated with composition(s) described herein in several ways but preferably via spraying or dripping. Spray and drip treatment may be conducted by formulating compositions described herein and spraying or dripping the composition(s) onto a seed(s) via a continuous treating system (which is calibrated to apply treatment at a predefined rate in proportion to the continuous flow of seed), such as a drum-type of treater. Batch systems, in which a predetermined batch size of seed and composition(s) as described herein are delivered into a mixer, may also be employed.

[0360] In another embodiment, the treatment entails coating plant elements. One such process involves coating the inside wall of a round container with the composition(s) described herein, adding plant elements, then rotating the container to cause the plant elements to contact the wall and the composition(s), a process known in the art as “container coating.” Plant elements can be coated by combinations of coating methods. Soaking typically entails using liquid forms of the compositions described. For example, plant elements can be soaked for about 1 minute to about 24 hours (e.g., for at least 1 min, between 1 and 5 min, 5 min, between 5 and 10 min, 10 min, between 10 and 20 min, 20 min, between 20 and 40 min, 40 min, between 40 and 80 min, 80 min, between 80 min and 3 hrs, 3 hrs, between 3 hrs and 6 hrs, 6 hr, between 6 hrs and 12 hrs, 12 hr, between 12 hrs and 24 hrs, 24 hrs).

### Population of Plants and Agricultural Fields

[0361] A major focus of crop improvement efforts has been to select varieties with traits that give, in addition to the highest return, the greatest homogeneity and uniformity. While inbreeding can yield plants with substantial genetic identity, heterogeneity with respect to plant height, flowering time, and time to seed, remain impediments to obtaining a homogeneous field of plants. The inevitable plant-to-plant variability is caused by a multitude of factors, including uneven environmental conditions and management practices. Another possible source of variability can, in some cases, be due to the heterogeneity of the endophyte population inhabiting the plants. By providing endophyte populations onto plant reproductive elements, the resulting plants generated by germinating the plant reproductive elements have a more consistent endophyte composition, and thus are expected to yield a more uniform population of plants.

[0362] Therefore, in another embodiment, the invention provides a substantially uniform population of plants. The population can include at least 10 plants, between 10 and 100 plants, for example, at least 100 plants, between 100 and 300 plants, at least 300 plants, between 300 and 1,000 plants, at least 1,000 plants, between 1,000 and 3,000 plants, at least 3,000 plants, between 3,000 and 10,000 plants, at least 10,000 plants, between 10,000 and 30,000 plants, at least 30,000 plants, between 30,000 and 100,000 plants, at least 100,000 plants or more. The plants are derived from plant reproductive elements comprising endophyte populations as described herein. The plants are cultivated in substantially uniform groups, for example in rows, groves, blocks, circles, or other planting layout.

[0363] The uniformity of the plants can be measured in a number of different ways. In one embodiment, there is an increased uniformity with respect to endophytes within the plant population. For example, in one embodiment, a substantial portion of the population of plants, for example at least 10%, between 10% and 20%, at least 20%, between 20% and 30%, at least 30%, between 30% and 40%, at least 40%, between 40% and 50%, at least 50%, between 50% and 60%, at least 60%, between 60% and 70%, at least 70%, between 70% and 75%, at least 75%, between 75% and 80%, at least 80%, between 80% and 90%, at least 90%, between 90% and 95%, at least 95% or more of the plant elements or plants in a population, contains a threshold number of an endophyte population. The threshold number can be at least 10 CFU, between 10 and 100 CFU, at least 100 CFU, between 100 and 300 CFU, for example at least 300 CFU, between 300 and 1,000 CFU, at least 1,000 CFU, between 1,000 and 3,000 CFU, at least 3,000 CFU, between 3,000 and 10,000 CFU, at least 10,000 CFU, between 10,000 and 30,000 CFU, at least 30,000 CFU, between 30,000 and 100,000 CFU, at least 100,000 CFU or more, in the plant or a part of the plant. Alternatively, in a substantial portion of the population of plants, for example, in at least 1%, between 1% and 10%, at least 10%, between 10% and 20%, at least 20%, between 20% and 30%, at least 30%, between 30% and 40%, at least 40%, between 40% and 50%, at least 50%, between 50% and 60%, at least 60%, between 60% and 70%, at least 70%, between 70% and 75%, at least 75%, between 75% and 80%, at least 80%, between 80% and 90%, at least 90%, between 90% and 95%, at least 95% or more of the plants in the population, the endophyte population that is provided to the seed or seedling represents at least 0.1%, between 0.1% and 1% at least 1%, between 1% and 5%, at least 5%, between 5% and 10%, at least 10%, between 10% and 20%, at least 20%, between 20% and 30%, at least 30%, between 30% and 40%, at least 40%, between 40% and 50%, at least 50%, between 50% and 60%, at least 60%, between 60% and 70%, at least 70%, between 70% and 80%, at least 80%, between 80% and 90%, at least 90%, between 90% and 95%, at least 95%, between 95% and 99%, at least 99%, between 99% and 100%, or 100% of the total endophyte population in the plant/seed.

[0364] In an embodiment, there is increased genetic uniformity of a substantial proportion or all detectable endophytes within the taxa, genus, or species of a component relative to an uninoculated control. This increased uniformity can be a result of the endophyte being of monoclonal origin or otherwise deriving from a population comprising a more uniform genome sequence and plasmid repertoire than would be present in the endophyte population a plant that derives its endophyte community largely via assimilation of diverse soil symbionts.

[0365] In another embodiment, there is an increased uniformity with respect to a physiological parameter of the plants within the population. In some cases, there can be an increased uniformity in the height of the plants when compared with a population of reference agricultural plants grown under the same conditions. For example, there can be a reduction in the standard deviation in the height of the plants in the population of at least 5%, between 5% and 10%, for example, at least 10%, between 10% and 15%, at least 15%, between 15% and 20%, at least 20%, between 20% and 30%, at least 30%, between 30% and 40%, at least 40%, between 40% and 50%, at least 50%, between 50% and 60%, at least 60% or more, when compared with a population of reference agricultural plants grown under the same conditions. In other cases, there can be a reduction in the standard deviation in the flowering time of the plants in the population of at least 5%, between 5% and 10%, for example, at least 10%, between 10% and 15%, at least 15%, between 15% and 20%, at least 20%, between 20% and 30%, at least 30%, between 30% and 40%, at least 40%, between 40% and 50%, at least 50%, between 50% and 60%, at least 60% or more, when compared with a population of reference agricultural plants grown under the same conditions.

### Commodity Plant Products

[0366] The present invention provides a commodity plant product, as well as methods for producing a commodity plant product, that is derived from a plant of the present invention. As used herein, a “commodity plant product” refers to any composition or product that is comprised of material derived from a plant, seed, plant cell, or plant element of the present invention. Commodity plant products may be sold to consumers and can be viable or nonviable. Nonviable commodity products include but are not limited to nonviable plant elements and grains; processed seeds, seed parts, and plant elements; dehydrated plant tissue, frozen plant tissue, and processed plant tissue; seeds and plant elements processed for animal feed for terrestrial and/or aquatic animal consumption, oil, meal, flour, flakes, bran, fiber, paper, tea, coffee, silage, crushed of whole grain, and any other food for human or animal consumption such as the fruit or other edible portion of the plant; and biomasses and fuel products; and raw material in industry.

[0367] Industrial uses of oils derived from the agricultural plants described herein include ingredients for paints, plastics, fibers, detergents, cosmetics, lubricants, and biodiesel fuel. Plant oils may be split, inter-esterified, sulfurized, epoxidized, polymerized, ethoxylated, or cleaved. Designing and producing plant oil derivatives with improved functionality and improved oliochemistry is a rapidly growing field. For example, a mixture of triglycerides is usually split and separated into pure fatty acids, which are then combined with petroleum-derived alcohols or acids, nitrogen, sulfonates, chlorine, or with fatty alcohols derived from fats and oils to produce the desired type of oil or fat. Commodity plant products also include industrial compounds, such as a wide variety of resins used in the formulation of adhesives, films, plastics, paints, coatings and foams.

[0368] Although the present invention has been described in detail with reference to examples below, it is understood that various modifications can be made without departing from the spirit of the invention. For instance, while the particular examples below may illustrate the methods and embodiments described herein using a specific plant, the principles in these examples may be applied to any agricultural crop. Therefore, it will be appreciated that the scope of this invention is encompassed by the embodiments of the inventions recited herein and the specification rather than the specific examples that are exemplified below.

[0369] All cited patents and publications referred to in this application are herein incorporated by reference in their entirety.

### EXAMPLES

### Example 1: Isolation and Identification of Penicillium Fungal Endophytes

[0370] Isolation and cultivation of endophytic microbes from agricultural plants was performed according to methods well known in the art. Microbial taxa found in agriculturally relevant communities were identified using high-throughput marker gene sequencing across several crops and numerous varieties of seeds.

[0371] Classification of fungal strains using ITS sequences was done by the following methodology.

[0372] Total genomic DNA was extracted from individual fungal isolates, using the Qiagen DNeasy Plant Mini Kit. Polymerase Chain Reaction (PCR) was used to amplify the nuclear ribosomal internal transcribed spacers (ITS) and the 5.8S gene (ITS ribosomal DNA [rDNA]) and when possible the first 600 bp of the large subunit (LSU rDNA) as a single fragment (ca. 1,000 to 1,200 bp in length) using the forward primer ITS1F (5′-CTTGGTCATTTAGAGGAAGTAA-3′) given as SEQ ID NO: 8, and the reverse primer ITS4 (5′-TCCTCCGCTTATTGATATGC-3′) given as SEQ ID NO: 9. Each 25 microliter-reaction mixture included 22.5 microliters of Invitrogen Platinum Taq supermix, 0.5 microliter of each primer (10 uM), and 1.5 microliters of DNA template (˜2-4 ng). Cycling reactions were run with MJ Research PTC thermocyclers and consisted of 94° C. for 5 min, 35 cycles of 94° C. for 30 s, 54° C. for 30 s, and 72° C. for 1 min, and 72° C. for 10 min. Sanger sequencing was performed using an ABI 3730x1 DNA Analyzers for capillary electrophoresis and fluorescent dye terminator detection.

[0373] PCR reactions were purified to remove primers, dNTPs, and other components by methods known in the art, for example by the use of commercially available PCR clean-up kits, or 3M sodium acetate and washed in absolute ethanol as described below, and resuspended in sterile water. DNA amplicons were then sequenced using methods known in the art, for example Sanger sequencing (Johnston-Monje and Raizada 2011, PLoS ONE 6(6): e20396) using one of the two primers used for amplification.

[0374] The resulting sequences were aligned as query sequences with publicly available databases such as GenBank nucleotide, UNITE (Abarenkov et al., 2010, New Phytologist 186(2): 281-285 and PlutoF (Abarenkov et al. 2010b, Evol Bioinform 189-196). UNITE and PlutoF are specifically compiled and used for identification of fungi. In all the cases, the isolates were identified to species level if their sequences were more than 95% similar to any identified accession from all databases analyzed (Zimmerman and Vitousek 2012, 109(32):13022-13027). When the similarity percentage was between 90-97%, the isolate was classified at genus, family, order, class, subdivision or phylum level depending on the information displayed in databases used. To support the molecular identification, fungal taxa were confirmed by inducing sporulation on PDA or V8 agar plates and using reported morphological criteria for identification of fruiting bodies structure and shape (Ainsworth et al. 2008, Ainsworth & Bisby's Dictionary of the Fungi 2008, CABI).

[0375] Strain A (Penicillium sp.) is described herein by its ITS sequence given as SEQ ID NO: 1.

[0376] Strain B (Penicillium SMCD2206) is described herein by its ITS sequence given as SEQ ID NO: 2. Strain B is deposited with International Depositary Authority of Canada (IDAC, National Microbiology Laboratory, Public Health Agency of Canada, 1015 Arlington Street, Winnipeg, Manitoba, Canada, R3E 3R2) as Deposit ID 081111-01.

[0377] The strain-specific primer pair for Strain B is given as SEQ ID NO: 10 for the forward primer and SEQ ID NO: 11 for the reverse primer. The amplicon resulting from sequencing using those primers is given as SEQ ID NO: 3.

[0378] Strain D (Penicillium olsonii) is described herein by its ITS sequence given as SEQ ID NO: 4.

[0379] Strain E (Penicillium griseofulvum) is described herein by its ITS sequence given as SEQ ID NO: 5.

[0380] Strain F (Penicillium janthinellum) is described herein by its ITS sequence given as SEQ ID NO: 6.

[0381] Strain G (Penicillium sp.) is described herein by its ITS sequence given as SEQ ID NO: 7.

[0382] The polynucleotide sequences for SEQ ID NOs: 1-11 are given in Table 1.

[0383] Based on performance in experiments assessing different agronomici traits in plants grown from seeds treated with each Penicillium endohyte strain in the present invention, Strains A, B, D, and E are described as beneficial Penicillium strains as compared to Penicillium Strains F and G.

### Example 2: In Vitro Testing and Characterization of Penicillium Fungal Endophytes

### Strains and Culture Preparations

[0384] Fungal endophyte strain Strain B was tested for various metabolic activities as described below.

[0385] To prepare the cultures as initial inocula for various assays, fungi were grown in one liter of Yeast Extract Peptone Dextrose (YEPD) broth in a 2.5-liter Ultra Yield and Fernbeck flasks (Thomson Instrument Company). The cultures were grown at 25° C. with continuous shaking at a speed of 130 revolutions per minute (rpm) for five days. The cultures were aliquoted into 50-mL Falcon tubes and were harvested by centrifugation at a speed of 3,500 rpm for 20 minutes. For each sample, one gram (g) of fresh biomass was first rinsed in 5 mL sterile water and resuspended in 15 mL of sterile water. In order to achieve homogeneity, samples were sonicated for 15 seconds continuously with probe intensity set to 3 using the Sonic Dismembrator Model 100 (Thermo Fisher Scientific, Waltham, Mass.). Strain purity was assessed by plating 100 microliter (uL) of fungal strain resuspension on PDA. After sonication, the cultures were allowed to sit at room temperature for 5-10 minutes before being used in in vitro assays.

[0386] Photographs of the culture plates of Penicillium strains A, B, D, E, F, and G are given in FIGS. 1-6, respectively.

### Auxin Biosynthesis by Endophytes

[0387] To measure auxin levels, 100 microliters of fungal culture prepared as described above was inoculated into 1 mL of R2A broth supplemented with L-tryptophan (5 mM) in transparent flat bottom, 12-well tissue culture plates. Each culture was grown in three duplicates. The plates were sealed with a breathable membrane, wrapped in aluminum foil, and incubated at 25° C. on a shaker at a speed of 150 rpm in the dark for 3 days. After 3 days the OD600 nm and OD530 nm were measured on a plate reader to check for fungal growth. After measuring these ODs, the culture from each well was transferred into a 1.5 mL Eppendorf tube and briefly spun for 1 minute at top speed in a conventional centrifuge. An aliquot of 250 microliters of supernatant was transferred into each well of transparent flat bottom, 48-well tissue culture plates. 50 microliters of yellowish Salkowski reagent (0.01 M FeCl3 in 35% HClO4 (perchloric acid, #311421, Sigma) were added to each well and incubated in the dark for 30 minutes before measuring the OD540 nm in a plate reader to detect pink/red color. Images were also taken for qualitative scoring of the results later.

[0388] Auxin is an important plant hormone that can promote cell enlargement and inhibit branch development (meristem activity) in above ground plant tissues, while below ground it has the opposite effect, promoting root branching and growth. Additionally, auxin signaling pathway has been shown to interact with plant defense signaling pathways. Several microbes utilize the auxin-defense crosstalk to down-regulate the defense responses, therefore allowing harmonious co-existence of the microbe and plants.

[0389] Strain B was screened for the ability to produce auxin as a possible growth-promoting agent (Table 2).

### Acetoin and Diacetyl Production

[0390] The method was adapted from Phalip et al., (1994) J Basic Microbiol 34: 277-280. (incorporated herein by reference). 100 microliters of fungal culture prepared as described above was inoculated into 1 mL of R2A broth supplemented with 5% sterile glucose in transparent flat bottom, 12-well tissue culture plates. Each culture was grown in triplicates. The plates were sealed with a breathable membrane, wrapped in aluminum foil, and incubated at 25° C. on a shaker at a speed of 150 rpm in the dark for 3 days. After 3 days the OD600 nm and OD525 nm were measured on a plate reader to check for fungal growth. After measuring these ODs, the culture from each well was transferred into a 1.5 mL Eppendorf tube and briefly spun for 1 minute at top speed in a conventional centrifuge. An aliquot of 250 microliters of supernatant was transferred into each well of transparent flat bottom, 48-well tissue culture plates. 50 microliters per well was added of freshly blended Barritt's Reagents A and B [5 g/L creatine mixed 3:1 (v/v) with freshly prepared alpha-naphthol (75 g/L in 2.5 M sodium hydroxide)]. After 30 minutes, images were taken to score for red or pink coloration relative to a copper colored negative control and the absorption at 525 nm was measured using a plate reader to quantify the acetoin and diacetyl abundance.

[0391] Acetoin is a neutral, four-carbon molecule used as an external energy storage by a number of fermentive microbes. It is produced by the decarboxylation of alpha-acetolactate, a common precursor in the biosynthesis of branched-chain amino acids. Owing to its neutral nature, production and excretion of acetoin during exponential growth prevents overacidification of the cytoplasm and the surrounding medium that would result from accumulation of acidic metabolic products, such as acetic acid and citric acid. Once superior carbon sources are exhausted, and the culture enters stationary phase, acetoin can be used to maintain the culture density.

[0392] Strain B acetoin results are summarized in Table 2.

### Siderophore Production

[0393] To ensure no contaminating iron was carried over from previous experiments, all glassware was deferrated with 6 M HCl and water prior to media preparation [Cox (1994) Methods Enzymol 235: 315-329, incorporated herein by reference]. In this cleaned glassware, 1 mL of R2A broth media, which is iron limited, was aliquotted into each well of transparent flat bottom, 12-well tissue culture plates. 100 microliters of fungal culture prepared as described above were inoculated into each well. Each culture was grown in three replicates. The plates were sealed with a breathable membrane, wrapped in aluminum foil, and incubated at 25° C. on a shaker at a speed of 150 rpm in the dark for 3 days. After 3 days the OD600 nm and OD530 nm were measured on a plate reader to check for fungal growth. After measuring these ODs, the culture from each well was transferred into a 1.5 mL Eppendorf tube and briefly spun for 1 minute at top speed in a conventional centrifuge. An aliquot of 250 microliters of supernatant was transferred into each well of transparent flat bottom, 48-well tissue culture plates. After incubation, 100 microliters of 0-CAS preparation without gelling agent [Perez-Miranda et al. (2007), J Microbiol Methods 70: 127-131, incorporated herein by reference] was added into each well. One liter of 0-CAS reagent was prepared using the cleaned glassware by mixing 60.5 mg of chrome azurol S (CAS), 72.9 mg of hexadecyltrimethyl ammonium bromide (HDTMA), 30.24 g of finely crushed Piperazine-1,4-bis-2-ethanesulfonic acid (PIPES) with 10 mL of 1 mM FeCl3.6H2O in 10 mM HCl solvent. The PIPES had to be finely powdered and mixed gently with stirring (not shaking) to avoid producing bubbles, until a deep blue color was achieved. 30 minutes after adding the reagent to each well, images were taken and color change was scored by looking for purple halos (catechol type siderophores) or orange colonies (hydroxamate siderophores) relative to the deep blue of the O-CAS. Absorption at 420 nm was measured using a plate reader to quantify the abundance of siderophore.

[0394] Siderophore production by fungus on a plant surface or inside a plant may both show that a microbe is equipped to grow in a nutrient limited environment, and perhaps protect the plant environment from invasion by other, perhaps undesirable microbes. Strain B siderophore results are summarized in Table 2.

### Additional In Vitro Testing and Characterization of Penicillium Fungal Endophytes

[0395] Examples below are adapted from: Johnston-Monje and Raizada (2011), which is incorporated herein by reference in its entirety.

[0396] Assay for Growth on Nitrogen Free LGI Media.

[0397] All glassware is cleaned with 6 M HCl before media preparation. A new 96 deep-well plate (2 mL well volume) is filled with 1 mL/well of sterile LGI broth [per L, 50 g Sucrose, 0.01 g FeCl₃-6H₂O, 0.8 g K₃PO₄, 0.2 g MgSO₄-7H₂O, 0.002 g Na₂MoO₄-2H₂O, pH 7.5]. Bacteria are inoculated with a flame-sterilized 96 pin replicator. The plate is sealed with a breathable membrane, incubated at 25° C. with gentle shaking for 5 days, and OD₆₀₀ readings taken.

[0398] ACC Deaminase Activity Assay.

[0399] Microbes are assayed for growth with ACC as their sole source of nitrogen. Prior to media preparation all glassware is cleaned with 6 M HCl. A 2 M filter sterilized solution of ACC (#1373A, Research Organics, USA) is prepared in water. 1 ul/mL of this is added to autoclaved LGI broth (see above), and 1 mL aliquots are placed in a new 96 well plate. The plate is sealed with a breathable membrane, incubated at 25° C. with gentle shaking for 5 days, and OD600 readings taken. Only wells that are significantly more turbid than their corresponding nitrogen free LGI wells are considered to display ACC deaminase activity.

[0400] Mineral Phosphate Solubilization Assay.

[0401] Microbes are plated on tricalcium phosphate media. This is prepared as follows: 10 g/L glucose, 0.373 g/L NH₄NO₃, 0.41 g/L MgSO₄, 0.295 g/L NaCl, 0.003 FeCl₃, 0.7 g/L Ca₃HPO₄ and 20 g/L Agar, pH 6, then autoclaved and poured into 150 mm plates. After 3 days of growth at 25° C. in darkness, clear halos are measured around colonies able to solubilize the tricalcium phosphate.

[0402] RNAse Activity Assay.

[0403] 1.5 g of torula yeast RNA (#R6625, Sigma) is dissolved in 1 mL of 0.1 M Na₂HPO₄ at pH 8, filter sterilized and added to 250 mL of autoclaved R2A agar media which is poured into 150 mm plates. The microbes are inoculated inoculated using a flame-sterilized 96 pin replicator, and incubated at 25° C. for 3 days. On day three, plates are flooded with 70% perchloric acid (#311421, Sigma) for 15 minutes and scored for clear halo production around colonies.

[0404] Pectinase Activity Assay.

[0405] Adapting a previous protocol 0.2% (w/v) of citrus pectin (#76280, Sigma) and 0.1% triton X-100 are added to R2A media, autoclaved and poured into 150 mm plates. Microbes are inoculated using a 96 pin plate replicator. After 3 days of culturing in the darkness at 25° C., pectinase activity is visualized by flooding the plate with Gram's iodine. Positive colonies are surrounded by clear halos.

[0406] Cellulase Activity Assay.

[0407] Adapting a previous protocol, 0.2% carboxymethylcellulose (CMC) sodium salt (#C5678, Sigma) and 0.1% triton X-100 are added to R2A media, autoclaved and poured into 150 mm plates. Microbes are inoculated using a 96 pin plate replicator. After 3 days of culturing in the darkness at 25° C., cellulose activity is visualized by flooding the plate with Gram's iodine. Positive colonies are surrounded by clear halos.

[0408] Oxidase and Catalase Activity Assays.

[0409] Oxidase and catalase activities are tested with 1% (w/v) tetramethyl-p-phenylene diamine and 3% (v/v) hydrogen peroxide solution, respectively. Gelatin and casein hydrolytic properties are analyzed by streaking fungal strains onto TSA plates from the stock culture. After incubation, trichloroacetic acid (TCA) is applied to the plates and an observation is made immediately for a period of at least 4 min (Medina and Baresi 2007, J Microbiol Methods 69:391-393). Chitinase activity of the isolates is determined as zones of clearing around colonies following the method of Chernin et al. (1998) J Bacteriol 180:4435-4441 (incorporated herein by rereference). Hemolytic activity is determined by streaking fungal isolates onto Columbia 5% sheep blood agar plates. Protease activity is determined using 1% skimmed milk agar plates, while lipase activity is determined on peptone agar medium. Formation of halo zone around colonies was used as indication of activity (Smibert and Krieg 1994, In: Gerhardt P, Murray R, Wood W, Krieg N (Eds) Methods for General and Molecular Bacteriology, ASM Press, Washington, D.C., pp 615-640, incorporated herein by reference). Pectinase activity is determined on nutrient agar supplemented with 5 g L⁻¹ pectin. After 1 week of incubation, plates are flooded with 2% hexadecyl trimethyl ammonium bromide solution for 30 min. The plates are washed with 1M NaCl to visualize the halo zone around the fungal growth (Mateos et al. 1992, Appl Environ Microbiol 58:1816-1822, incorporated herein by reference).

[0410] Assays for Poly-Hydroxybutyrate (PHB) and n-Acyl-Homoserine Lactone (AHL) Production.

[0411] The fungal isolates are tested for PHB production (qualitative) following the viable colony staining methods using Nile red and Sudan black B (Juan et al. 1998 Appl Environ Microbiol 64:4600-4602; Spiekermann et al. 1999, Arch Microbiol 171:73-80, each of which is incorporated by reference). The LB plates with overnight fungal growth are flooded with 0.02% Sudan black B for 30 min and then washed with ethanol (96%) to remove excess strains from the colonies. The dark blue coloured colonies are taken as positive for PHB production. Similarly, LB plates amended with Nile red (0.5 uL mL⁻¹) were exposed to UV light (312 nm) after appropriate fungal growth to detect PHB production. Colonies of PHA-accumulating strains fluoresce under ultraviolet light. The fungal strains were tested for AHL production following the method modified from Cha et al. (1998), Mol Plant-Microbe Interact 11:1119-1129. The LB plates containing 40 ug ml⁻¹ X-Gal are plated with reporter strains (A. tumefaciens NTL4.pZLR4). The LB plates are spot inoculated with 10 uL of fungal culture and incubated at 28±2° C. for 24 h. Production of AHL activity is indicated by a diffuse blue zone surrounding the test spot of culture. Agrobacterium tumefaciens NTL1 (pTiC58ΔaccR) is used as positive control and plate without reporter strain is considered as a negative control.

[0412] Antibiosis Assay.

[0413] Bacteria or fungi are inoculated using a 96 pin plate replicator onto 150 mm Petri dishes containing R2A agar, then grown for 3 days at 25° C. At this time, colonies of either E. coli DH5a (gram negative tester), Bacillus subtillus ssp. Subtilis (gram positive tester), or yeast strain AH109 (fungal tester) are resuspended in 1 mL of 50 mM Na₂HPO₄ buffer to an OD₆₀₀ of 0.2, and 30 ul of this is mixed with 30 mL of warm LB agar. This is quickly poured completely over a microbe array plate, allowed to solidify and incubated at 37° C. for 16 hours. Antibiosis is scored by looking for clear halos around fungal colonies.

[0414] Antagonistic activities against plant pathogenic bacteria, fungi and oomycetes. The antagonistic activities of fungal isolates are screened against plant pathogenic fungi (Fusarium caulimons, Fusarium graminarium, Fusarium oxysporum, Fusarium solani, Rhizoctonia solani, Thielaviopsis basicola) and oomycetes (Phytophthora infestans, Phytophthora citricola, Phytophthora cominarum).

[0415] Antagonistic activity of the fungal isolates against pathogenic fungi and oomycetes is tested by the dual culture technique on potato dextrose agar (PDA) and yeast malt agar (YMA) media (Dennis and Webster 1971, Trans Brit Mycol Soc 57:25-39, incorporated herein by reference). A small agar plug (5 mm in diameter) of target fungus/oomycetes is placed near the edge of petri dishes of both media, adjacent to an agar plug of the isolated fungus (as close as possible without touching). Plates are incubated for 14 days at 24° C. and radial growth or inhibition of it is measured.

### Biolog Assay

[0416] Fungal strains were maintained on potato dextrose agar (PDA) in dark at 25° C. and subcultured at regular intervals to maintain viability. Sterile cotton buds were used to gently scrape fungal spores and mycelial fragments from two-week old cultures that were resuspended in 5 mL Filamentous Fungi Inoculation Fluid (FF-IF) obtained from BIOLOG.

[0417] In order to achieve homogeneity, the fungal cell suspension was sonicated for 90 seconds continuously with probe intensity set to 3 using the Sonic Dismembrator Model 100 (Thermo Fisher Scientific, Waltham, Mass.). The homogenous cell suspension was measured using a microplate reader to achieve an absorbance range of 0.2-0.3 at 590 nm. A 48-fold dilution of the homogenous cell suspension was done using FF-IF, and 100 uL of the diluted sample was used per well in the 96-well Phenotype MicroArray (PM) 1 MicroPlate (Hayward, Calif.). The PM1 Microplate contained 95 carbon sources and one negative control. Each well contained a unique carbon substrate.

[0418] MicroPlates were sealed with Parafilm and incubated at 25° C. in an enclosed container for 72 hours. All MicroPlates were examined at intervals of 24 hours and assay results were recorded at 72 hours. The ability of each fungal strain to utilize the carbon substrates on the PM 1 Microplate was determined by measuring fungi cell growth/turbidity at 590 nm. All MicroPlates contained a negative control well (water only) that remained colorless until the end of each experiment indicating no or very little fungal cell growth.

[0419] The ability of a strain to utilize a specific carbon substrate in the BIOLOG PM MicroPlates could be determined by the increased turbidity due to cell growth in that particular well.

[0420] The following carbon substrates were utilized by Strain B: L-Arabinose, L-Proline, D-Xylose, L-Glutamic acid, D-Ribose, L-Asparagine, Sucrose, Tween 80, Adonitol, L-Alanine, L-Alanyl-Glycine, L-Galactonic-acid-γ-lactone, β-Methyl-D-glucoside, m-Inositol, D-Galactose, D-Trehalose, D-Glucuronic acid, D-Gluconic acid, D-Mannitol, D-L-Malic acid, α-D-Glucose, Maltose, D-Melibiose, Maltotriose, Pyruvic acid, D-Galacturonic acid, D-Mannose, L-Threonine, Inosine, L-Lyxose, D-Alanine, L-Lactic acid, D-Galactonic acid-γ-lactone, Uridine, α-Hydroxy Glutaric acid-γ-lactone, D-L-α-Glycerol phosphate.

[0421] Biolog assay results are summarized in Table 3.

### Example 3: Identification of Differentially Regulated Proteins in Penicillium Fungal Culture (Proteomics)

### Methods

[0422] Microbial Samples Preparation:

[0423] Microbes were cultivated in three biological replicates for each strain (Strain B and Strain F). Fungal strains were streaked on potato dextrose (PD) agar and individual plugs containing spores and mycelial tissues were used to initiate growth in 10 mL PD broth for 6 days. All strains were grown with agitation at room temperature. Microbial culture filtrate was harvested by centrifuging at 4500 RPM for 20 minutes in 15 mL Falcon tubes to allow culture separation and removal of the supernatant. Five mL of culture supernatant were used for secreted proteomics analysis. All steps were performed in sterile conditions. Culture filtrates were kept in dry ice after harvest at all times to preserve protein stability. Media-only samples consisting of PDB and R2A were tested independently to ensure the absence of intact proteins that may potentially interfere with the secreted microbial peptides.

[0424] Protein Purification and Visualization:

[0425] Samples were shipped to the vendor site (MS Bioworks, Ann Arbor, Mich.) for peptide purification and analysis. Each sample was concentrated on a Pall 3 kD MWCO MicroSep Spin Column (VWR Cat#89132-006) and quantified at 1:10 dilution by Qubit fluorometry (Life Technologies). Twelve ug of each sample was separated ˜1.5 cm on a 10% Bis-Tris Novex mini-gel (Invitrogen) using the MES buffer system. The gel was stained with Coomassie and each lane was excised into ten equally sized segments. Gel pieces were processed using a robot (ProGest, DigiLab) by washing with 25 mM ammonium bicarbonate followed by acetonitrile. The samples were subsequently reduced with 10 mM dithiothreitol at 60° C. followed by alkylation with 50 mM iodoacetamide at room temperature, digested with trypsin (Promega) at 37° C. for 4 hours and quenched with formic acid. The supernatant was analyzed directly without further processing.

[0426] Mass Spectrometry:

[0427] The digests were analyzed by nano LC/MS/MS with a Waters NanoAcquity HPLC system interfaced to a ThermoFisher Q Exactive. Peptides were loaded on a trapping column and eluted over a 75 um analytical column at 350 nL/min; both columns were packed with Proteo Jupiter resin (Phenomenex). A 30 min gradient was employed (5h total). The mass spectrometer was operated in data-dependent mode, with MS and MS/MS performed in the Orbitrap at 70,000 FWHM and 17,500 FWHM resolution, respectively. The fifteen most abundant ions were selected for MS/MS.

[0428] Data Acquisition and Processing:

[0429] Symbiota provided protein sequence data, KEGG annotations and corresponding protein mass spectrometry spectral count data to ABiL. All data were converted into file formats and a local database suitable for subsequent processing, analysis and parallelization.

[0430] Protein Ortholog Identification:

[0431] Pairs/groups of orthologous proteins were identified using a modified version of the OrthoMCL pipeline (Fischer, 2011). Orthologs were identified as reciprocal best BLASTP hits, and then clusters of orthologous proteins were defined using the modified OrthoMCL pipeline. This process was done independently for the within genera and the between genera analyses. BLASTP was run in parallel on the Georgia Tech PACE HPC environment.

[0432] Protein Functional Annotation:

[0433] KEGG annotations for individual proteins were provided by Symbiota. The program BLAST2GO (Conesa, 2005) was used to annotate proteins with gene ontology (GO) terms based on sequence similarity to previously annotated proteins.

[0434] Protein Expression Quantification and Normalization:

[0435] Individual protein expression levels were taken as the number of observed spectra (i.e. the spectra count) corresponding to each protein. Protein spectra counts were retrieved across three replicates for each species. Missing counts for any given ortholog or replicate were assigned values of 0. Individual protein expression levels (spectra counts) were then normalized by the total number of observed spectra for each replicate. This process was done independently for the three replicates corresponding to each member of the A-B pair of every species. Fold-change (FC) values for orthologous pairs/groups were computed as log 2 AB spectra counts for the purpose of functional enrichment analysis (below).

[0436] Protein Differential Expression Analysis:

[0437] Differential protein expression analysis was done for a) pairs of orthologous proteins from the within genera analysis and b) groups of orthologous proteins from the between genera analysis. Differential expression was quantified by comparing the within group normalized spectra count variation to the between group normalized spectra count variation using the Students t-test. A Benjamini-Hochberg False Discover Rate threshold of 0.2 was used to identify differentially abundant orthologous proteins.

[0438] Pathway and Functional Enrichment Analysis:

[0439] Enrichment analysis was done in parallel using both KEGG and GO annotations with the hypergeometric test and via Gene Set Enrichment Analysis (GSEA) (Huang, 2009; Subramanian, 2005). For the hypergeometric test, for any given functional annotation category (i.e. KEGG pathway or GO term), the number of proteins up-regulated in the beneficial member of the orthologous pair was compared to the total number of proteins up-regulated in the complete set of orthologs. For GSEA analysis, orthologous protein pairs/groups were ranked by FC values (as defined in #3 above) and the distribution of FC values was evaluated for a shift using the clusterprofiler R package (Yu, 2012).

### Results

[0440] Secreted fungal proteins as cataloged in this experiment were at the interface of the host-symbiont symbiosis, and play important roles in modulating the plant-microbe interaction due to the molecules having direct access to the plant host cell wall.

[0441] The in-culture secretomics analysis of the beneficial (Strain B) and control (Strain F) strains of the filamentous fungus Penicillium revealed a total of 71 secreted proteins of which 66 could be grouped in either Gene Ontology (GO) or Kyoto Encyclopedia of Genes and Genomes (KEGG).

[0442] Comparative analysis of the orthologous proteins expressed by the beneficial and control strains of Penicillium revealed a total of 13 orthologous proteins (12 could be categorized either in GO or KEGG) that were secreted in the beneficial strain culture only. (Table 4A). The proteins ranged between 12.3 to 5-fold difference (differential expression was quantified by comparing the within group normalized spectra count variation to the between group normalized spectra count variation using the Students t test).

[0443] Similar differential expression analysis of the secreted proteins showed that 43 (41 could be categorized either in GO or KEGG) orthologous proteins were detected only in the control strain (Table 4B). The expression levels of proteins in the beneficial strain relative to the neutral strain were found to range from −11.3 to −3.7 in fold difference.

[0444] In addition, 11 (9 could be categorized either in GO or KEGG) orthologous proteins were found to be present in higher fold changes (5.1 to 2.2) in the beneficial Penicillium strain relative to the control strain (Table 4C), and four orthologous proteins were detected at a lower expression level (−7.7 to −0.8) in the beneficial strain in comparison with the control fungal strain (Table 4D).

[0445] Overall, the small proteins found to be secreted in the fungal culture could be categorized into various biological categories based on Gene Ontology (GO) clustering. Striking differential expression patterns were observed for proteins within the following gene families.
[0446] (1) carbohydrate and cellulose metabolism: glucan 1,4-alpha-glucosidase activity, polysaccharide metabolic process; glucan 1,4-alpha-glucosidase activity, polysaccharide catabolic process, starch binding; carbohydrate metabolic process, cell wall macromolecule catabolic process, lysozyme activity, peptidoglycan catabolic process; arabinogalactan endo-1,4-beta-galactosidase activity, carbohydrate metabolic process, glucosidase activity; carbohydrate binding, carbohydrate metabolic process, hydrolase activity, hydrolyzing O-glycosyl compounds, integral component of membrane; cellulose 1,4-beta-cellobiosidase activity, cellulose binding, cellulose catabolic process, extracellular region, hydrolase activity, hydrolyzing O-glycosyl compounds; carbohydrate metabolic process, glucan endo-1,6-beta-glucosidase activity, glucosylceramidase activity, sphingolipid metabolic process; acetylxylan esterase activity, cellulose catabolic process, extracellular region, hydrolase activity, methylation, methyltransferase activity, xylan catabolic process; carbohydrate binding, carbohydrate metabolic process, cell wall, cell wall organization, DNA binding, hydrolase activity, hydrolyzing O-glycosyl compounds, nucleus, transcription, DNA-templated, transferase activity, zinc ion binding; (1->3)-beta-D-glucan metabolic process, 1,3-beta-glucanosyltransferase activity, anchored component of membrane, carbohydrate metabolic process, fungal-type cell wall, hydrolase activity, integral component of membrane, plasma membrane, transferase activity; carbohydrate binding, carbohydrate metabolic process, hydrolase activity; carbohydrate metabolic process, hydrolase activity, hydrolyzing O-glycosyl compounds; bglX, Cyanoamino acid metabolism, Phenylpropanoid biosynthesis, Starch and sucrose metabolism; Carbohydrate digestion and absorption, E3.2.1.1, amyA, malS, Starch and sucrose metabolism; Galactose metabolism, galM, GALM, Glycolysis/Gluconeogenesis; E3.2.1.58, Starch and sucrose metabolism; E3.2.1.58, Starch and sucrose metabolism; E3.2.1.22B, galA, rafA, Galactose metabolism, Glycerolipid metabolism, Glycosphingolipid biosynthesis—globo series, Sphingolipid metabolism; carbohydrate binding, carbohydrate metabolic process, hydrolase activity; carbohydrate binding, carbohydrate metabolic process, endoribonuclease activity, hydrolase activity, hydrolyzing O-glycosyl compounds, integral component of membrane, RNA phosphodiester bond hydrolysis, endonucleolytic, rRNA transcription; carbohydrate binding, carbohydrate metabolic process, cell wall, cell wall organization, hydrolase activity, hydrolyzing O-glycosyl compounds, integral component of membrane, transferase activity; carbohydrate binding, carbohydrate metabolic process, hydrolase activity, acting on glycosyl bonds; E3.2.1.4, Starch and sucrose metabolism; E3.2.1.58, Starch and sucrose metabolism; Galactose metabolism, malZ, Starch and sucrose metabolism.
[0447] (2) ATP binding and the mitochondrion: ADP binding, ATP binding, ATP hydrolysis coupled proton transport, ATP synthesis coupled proton transport, mitochondrial ATP synthesis coupled proton transport, mitochondrial proton-transporting ATP synthase, catalytic core, proton-transporting ATP synthase activity, rotational mechanism, proton-transporting ATP synthase complex, catalytic core F(1), proton-transporting ATPase activity, rotational mechanism; cytosol, electron carrier activity, heme binding, metal ion binding, mitochondrial ATP synthesis coupled electron transport, mitochondrion, nucleus, oxidation-reduction process, respiratory chain; mitochondrion, oxidation-reduction process, oxidoreductase activity; ATP binding, carbohydrate phosphorylation, cell, cellular glucose homeostasis, glucose binding, glycolytic process, hexokinase activity.
[0448] (3) metabolic activities including hydrolase activity and protein glycosylation: MAN1, N-Glycan biosynthesis, Protein processing in endoplasmic reticulum, Various types of N-glycan biosynthesis; hydrolase activity, metabolic process; hydrolase activity, acting on ester bonds, metabolic process; catalytic activity, hydrolase activity, acting on glycosyl bonds, metabolic process; Betalain biosynthesis, Isoquinoline alkaloid biosynthesis, Melanogenesis, Riboflavin metabolism, TYR, Tyrosine metabolism; E5.1.3.15, Glycolysis/Gluconeogenesis; dephosphorylation, phosphatase activity; cytoplasm, GTP binding, GTPase activity, translation elongation factor activity, translation initiation factor activity, translational elongation, translational initiation; E3.1.3.8, Inositol phosphate metabolism; hydrolase activity, metabolic process; flavin adenine dinucleotide binding, integral component of membrane, oxidation-reduction process, oxidoreductase activity, acting on CH—OH group of donors; flavin adenine dinucleotide binding, oxidation-reduction process, oxidoreductase activity, acting on CH—OH group of donors; flavin adenine dinucleotide binding, oxidation-reduction process, oxidoreductase activity, acting on CH—OH group of donors, UDP-N-acetylmuramate dehydrogenase activity; chitosanase activity, extracellular region, polysaccharide catabolic process; carbohydrate metabolic process, chitin catabolic process, chitinase activity; hydrolase activity, acting on ester bonds, metabolic process.
[0449] (4) regulation of transcription: nutrient reservoir activity, regulation of transcription, DNA-templated, sequence-specific DNA binding, transcription factor activity, sequence-specific DNA binding.
[0450] (5) transport: APE2.
[0451] (6) proteolysis: PEPD; aspartic-type endopeptidase activity, carbohydrate binding, extracellular region, proteolysis, zymogen activation; aspartic-type endopeptidase activity, extracellular region, pathogenesis, proteolysis; pepP; FMN binding, integral component of membrane, metalloendopeptidase activity, oxidation-reduction process, oxidoreductase activity, proteolysis; ATP binding, helicase activity, nucleic acid binding, proteolysis, serine-type peptidase activity; aspartic-type endopeptidase activity, ATP binding, methylation, methyltransferase activity, nucleic acid binding, proteolysis, ribosome, structural constituent of ribosome, tryptophan-tRNA ligase activity, tryptophanyl-tRNA aminoacylation.
[0452] (7) cellular membrane-associated: integral component of membrane; cytoplasm, regulation of catalytic activity, Rho GDP-dissociation inhibitor activity; anchored component of membrane, carbohydrate metabolic process, plasma membrane, transferase activity; anchored component of membrane, carbohydrate metabolic process, hydrolase activity, plasma membrane, transferase activity; anchored component of membrane, carbohydrate metabolic process, plasma membrane, transferase activity.
[0453] (8) amino acid biosynthesis and metabolism: 2-Oxocarboxylic acid metabolism, Alanine, aspartate and glutamate metabolism, Arginine and proline metabolism, Biosynthesis of amino acids, Carbon fixation in photosynthetic organisms, Carbon metabolism, Cysteine and methionine metabolism, GOT1, Isoquinoline alkaloid biosynthesis, Phenylalanine metabolism, Phenylalanine, tyrosine and tryptophan biosynthesis, Tropane, piperidine and pyridine alkaloid biosynthesis, Tyrosine metabolism; Biosynthesis of amino acids, Carbon fixation in photosynthetic organisms, Carbon metabolism, Pentose phosphate pathway, rpiA; Glutathione metabolism, GSR, gor, Thyroid hormone synthesis; Cysteine and methionine metabolism, E3.3.1.1, ahcY; AGXT, Alanine, aspartate and glutamate metabolism, Carbon metabolism, Glycine, serine and threonine metabolism, Glyoxylate and dicarboxylate metabolism, Methane metabolism, Peroxisome; Cysteine and methionine metabolism, E2.4.2.28, mtaP.
[0454] (9) response to oxidative stress: msrA Methionine sulfoxide reductase.

[0455] Many secreted proteins in the carbohydrate and cellulose metabolism category were associated with degradation of xylan, a polysaccharide found abundantly in plant cell walls. The proteins have also been implicated to be important in symbiotic fungi such as mycorrhiza because of their ability to acquire and utilize carbon photosynthates such as sucrose that is found in abundance within the plant cell walls. Secreted proteins in this category such as invertase potentially may enable the fungal endophyte to more efficiently access similar plant-derived sugars (Ceccaroli et al. 2011).

[0456] In addition, one of the most notable findings uncovered in this study is that proteins that are associated with cell wall degradation namely glucan 1,4-alpha-glucosidase were secreted in high abundance in the beneficial Penicillium strain (Strain B). Interestingly, two of the highest expressed proteins (12.3 and 7.5 fold changes) in the beneficial fungal strain were identified as a glucan 1,4-alpha-glucosidase. This protein was found to be present only in the culture of Strain B and was detected to have little to no expression in the beneficial strain relative to the beneficial one. This is especially intriguing in light of a recent report documenting an enzyme similarly identified as a glucan 1,4-alpha-glucosidase that was isolated from the fungus Botrytis cinerea and was observed to play a crucial role in conferring improved disease resistance against B. cinerea, Pseudomonas syringae pv. tomato DC3000 and tobacco mosaic virus in plants challenged with those pathogens (Zhang et al 2015).

[0457] Proteins that were involved in ATP binding and mitochondrial ATP synthesis group are primarily involved in energy and reactive oxidative species (ROS) generation. In living organisms, ROS are used in many important biological processes such as signaling pathways and defense mechanisms against pathogens (Rexroth et al. 2012).

[0458] Fungal secreted proteins that were associated in metabolic processes such as hydrolase activity and protein glycosylation are known to include enzymes that could be useful for breaking down biomass to smaller molecules that are then subsequently utilized as nutrition sources (Li et al. 2004). These enzymes may be useful in breaking down plant cell components that are known to consist of cellulose, hemicellulose, pectins, and wall-associated proteins (Di Pietro et al. 2009). Studies have also reported on the abundance of secreted proteins that are involved in degrading biomass produced by other filamentous fungus such as Trichoderma reesei (Foreman et al. 2003). The role of glycosylation as a form of post-translational modification in filamentous fungi is well studied, and members of this group are associated with stability, secretion and localization of proteins. In addition, there are also reports of glycoproteins that are localized within the membrane playing a role in trans-membrane communication (Despande et al. 2008).

[0459] A markedly higher expression of proteins that are involved in the hydrolase activity was observed in the control Penicillium strain (Strain F) in this study. For instance, in the beneficial Penicillium strain (Strain B), the total number of expressed proteins associated with hydrolase activity totaled eight. Three of those proteins were detected only in the beneficial strain (Strain B), and another three had lower expression than its control counterpart (Strain F). Interestingly, the total number of expressed proteins associated in this category in the control Penicillium strain was 19. Fourteen of the 19 proteins, (74%) had very little or no expression in the beneficial Penicillium strain, while two were expressed higher relative to the beneficial strain. Only three proteins implicated in hydrolase activity were expressed lower in the control strain relative to the beneficial strain.

[0460] Fungal proteins that are involved in the regulation of transcription have been documented extensively in filamentous fungi. For instance, it is well-known that fungi produce low-molecular mass compounds known as secondary metabolites that exert important roles not only in transcription but also, in development and intercellular communications within the cellular milieu (Brakhage, 2013). In a recent review of fungal secreted proteins, Lo Presti et al. (2015) highlighted the role of a symbiont fungal effector; a group that encompasses any secreted molecule that is involved in regulating the fungal-plant relationship, in interactions with a plant host ethylene-responsive transcription factor which in turn modulates the expression of genes involved in host defense.

[0461] Fungal proteins that grouped with the transport category have wide-ranging functions in modulating the plant-microbe symbiosis as reported by Dupont et al. (2015). The transport of sugars and amino acid were among the function of these membrane transport proteins.

[0462] Fungal proteins that clustered within the proteolysis category typically included proteases and have been known to exist in endophytic (Lindstrom et al. 1993), and other filamentous fungi (Suarez et al. 2005). One such proteolytic enzyme, a fungal serine protease has been reported to in a mutualistic fungal endophyte, and the authors speculated that the expression of similar proteases may be a general feature of endophytes (Reddy et al. 1996). The inventors herein determined that such proteases were unique to beneficial fungal endophytes of the genus Penicillium.

[0463] Proteins associated with cellular membranes have been implicated in several processes. One notable finding in this dataset was the presence of Rho GDP-dissociation inhibitor activity in the control Penicillium strain, with very little to no expression detected in the beneficial strain (−7.7 fold change). In a study that investigated the functional role of this protein in another filamentous fungi, it has been reported that proteins like those play a role in modifying the fungal morphology especially related to the actin cyctoskeleton, in addition to being implicated in some gene expression and cell growth signaling pathways (Menotta et al. 2008).

[0464] Secreted proteins that were grouped in this category are important due to their role in building and breaking down amino acid residues. One such protein, 2-Oxocarboxylic acid, was reported to be one of the most enriched pathways in the cucumber pathogen, Botrytis cinerea during infection of the plant (Kong et al. 2015). Interestingly, this protein was present in only in the control Penicillium strain and was detected to have little to no expression in the beneficial strain relative to the beneficial one (−8.2 fold change).

[0465] One interesting finding obtained from comparing the secreted protein dataset of the beneficial and control Penicillium strains was the presence of a methionine sulfoxide reductase (msrA) in the culture of the control strain only. Enzymes such as msrA play a role in repairing damages caused by reactive oxygen species (ROS) on sulfur-containing amino acid residues, and in Aspergillus nidulans msrA confers protection against detrimental cellular modifications that are caused by oxidative stress (Soriani et al. 2009). This secreted protein was found to be present only in the culture of Strain F and was detected to have little to no expression in the beneficial strain Strain B (−8.2 fold change).

[0466] In conclusion, it was observed that the Penicillium strain secreted proteins in culture fall into nine major GO/KEGG categories. Proteins that were exclusively secreted by the beneficial Penicillium strain were grouped into 12 GO/KEGG categories while proteins that are only detected in the control strain encompassed 41 categories indicating that a wider range of proteins were secreted by the control fungal strain.

[0467] In the beneficial fungal secretome, there was enrichment of proteins that fell into carbohydrate and cellulose metabolic processes. Nine out of the 12 GO/KEGG categories (75%) of the proteins that were expressed only in the beneficial strain were grouped under that category, and based on the normalized protein spectra counts for both Penicillium strains, these proteins were secreted in abundance by the beneficial strain.

[0468] This differed in the secretome of the control strain, Strain F where only 14 out of 41 total specific GO/KEGG categories (34%) of orthologous proteins that are unique to that strain were found related to carbohydrate and cellulose metabolic processes. Therefore, the Penicillium culture secretome data supported the higher expression of secreted proteins related to carbohydrate and cellulose metabolism in a beneficial fungal strain compared to a control strain within the same genus.

[0469] One of the most striking findings based on the data was that a secreted protein that is involved in response to oxidative stress was expressed at a high level in the control strain relative to little or no presence in the beneficial fungal strain.

[0470] The secretome of the neutral strain of Penicillium strain also showed a slightly higher presence and expression of proteolytic proteins (13%) relative to the beneficial strain (12%). Interestingly, there was no lyase proteins detected in the beneficial strain's secretome, there were two secreted lyase protein that were expressed at −6.8 and −7.2 fold change in the neutral Penicillium strain relative to the beneficial strain. Lyase proteins in fungi are typically associated with breaking down pectin and glycosaminoglycans (Zhao et al. 2014), two major components of the plant cell wall.

### Example 4: Coating of Seeds with Penicillium Endophyte Strains

[0471] The following protocol was used to coat seeds with fungal inocula for planting in greenhouse trials. The “sticker” (2% methylcellulose) was autoclaved and aliquoted into 50 mL Falcon tubes. Seeds were pre-weighed and placed into 50 mL Falcon tubes (2 replicate seed aliquots per treatment). Penicillium strains were prepared by centrifuging cultures (2500×g for 10 minutes), removing supernatant, washing pellets, resuspending in minimal water, normalized to 10̂4 spores per seed in 250 uL sterile H2O. 250 uL of the 2% methylcellulose sticker was pre-mixed with the liquid culture suspension, and this liquid was pipetted onto the pre-weighed seeds. The Falcon tube was closed and shaken to distribute the culture:sticker mixed solution evenly. 150 uL of FloRite flowability polymer was added to the Falcon tube with the coated seeds, and shaken. Seeds were transferred to a labeled envelope and kept at room temperature until sowing. For all treatments, 2 replicate seed treatments were performed and on-seed CFUs were assessed on both replicates.

[0472] The following protocol was used to coat seeds with fungal inocula for planting in field trials. First, 3% Sodium alginate (SA) was prepared and autoclaved in the following manner. Erlenmeyer flasks were filled with the appropriate amount of deionized water and warmed to about 50 degrees C. on a heat plate with agitation using a stirring bar. SA powder was poured slowly into the water until it all dissolved. The solution was autoclaved (121° C. @15 PSI for 30 minutes). Talcum powder was autoclaved in dry cycle (121° C. @15 PSI for 30 minutes) and aliquoted in Ziploc bags or 50 ml falcon tubes at a ratio of 15 g per kg of seed to be treated for formulation controls and 10 g per kg of seed for actual treatments.

[0473] The next day, seeds were treated with either powdered or liquid formulations.

[0474] For powdered formulations, 10 g per kg of seed was allocated to the seeds to be treated, according to the following procedure. Seeds were placed in large plastic container. 16.6 ml of 2% SA per Kg of seeds to be treated were poured on the seeds. The container was covered and shaken slowly in orbital motion for about 20 seconds to disperse the SA. Endophyte powder was mixed with an equal amount of talcum powder. The mix of endophyte and talc was added on top of the seeds, trying to disperse it evenly. The container was covered and seeds were shaken slowly in orbital motion for about 20 seconds. 13.3 ml of Flo-rite per kg of seed to be treated is poured on the seeds. Seeds were shaken again, slowly and in orbital motion.

[0475] For liquid formulations, 8.5 mL per seed was allocated to the seeds to be treated, according to the following procedure. Seeds were placed in large plastic container. 8.3 ml of 2% SA per kg of seed and the same amount of culture (8.3 ml per kg of seed) were poured on the seeds. The container was covered and shaken slowly in orbital motion for about 20 seconds to disperse the SA. 15 g of talcum powder per kg of seed were added, trying to disperse it evenly. The container was covered and seeds were shaken slowly in orbital motion for about 20 seconds. 13.3 ml of Flo-rite per kg of seed to be treated were poured on the seeds. Seeds were shaken again, slowly and in orbital motion.

### Example 5: Seedling Assays

### Seeds and Seed Sterilization

[0476] Seeds were surface-sterilized with chlorine gas and hydrochloric acid as follows: Seeds were placed in a 250 mL open glass bottle and placed inside a desiccator jar in a fume. The cap of the glass bottle was treated similarly. A beaker containing 100 mL of commercial bleach (8.25% sodium hypochlorite) was placed in the desiccator jar near the bottle containing the seeds. Immediately prior to sealing the jar, 3 mL of concentrated hydrochloric acid (34-37.5%) was carefully added to the bleach and the bottle gently shaken to mix both components. The sterilization was left to proceed for 16 hours. After sterilization, the bottle was closed with its sterilized cap, and reopened in a sterile laminar hood. The opened bottle was left in the sterile hood for a minimum of one hour, with occasional shaking and mixing to air out the seeds and remove chlorine gas leftover. The bottle was then closed and the seeds stored at room temperature in the dark until use.

### Seed Coating of Formulation

[0477] Coating of seeds with dry or liquid formulation was executed as described in Example 4. All endophytes were grown in UltraYields flasks. Besides non-treated seeds, seeds were also coated with liquid formulation and medium only, to serve as controls.

### Seed Germination Assay on Water Agar

[0478] Sterilized seeds were placed onto water agar plates (1.3% bacto agar) in a biosafety hood using flamed forceps. For each treatment, 4 plates were sowed with 8 seeds each plate. After sowing, plates were sealed with Parafilm, randomized to avoid position effects, and placed in a drawer at room temperature in the dark. Seed germination was monitored every day for 2-4 days. After 3 days, images were taken of each plate and the root length of each seedling is measured using the imaging software ImageJ. The percentage difference between the treated seedlings, the mock-treated seedlings, and non-treated seedlings was then calculated.

### Rolling Paper Assay for Evaluating Seed Germination and Seedling Drought Tolerance

[0479] Sterilized seeds were placed 1-inch apart from each other onto sterilized rolling paper pre-soaked with sterile diH20 in a biosafety hood. The seeds were placed about one inch below the top and about ten inches above the bottom of the rolling paper. After placing the seeds, another layer of pre-soaked rolling paper was covered onto the top and the paper was carefully and slowly rolled up. The paper roll with seeds was placed vertically into autoclaved glass jar and covered with the lid to hold water absorbed in rolling paper. The jars were kept in a growth chamber in the dark, at 22° C., 60% RH for 4 days. At day 4, the lids were opened and the jars placed at 22° C., 70% RH, 12 h day light (level 4, ˜300-350 microE) for 3 more days before scoring.

### Drought Tolerance Assay Using Vermiculite

[0480] After scoring the germination rate of seeds on water agar, seedlings of similar physiological status (i.e., similar radical and shoot lengths) were transferred onto autoclaved vermiculite loosely packed in test tubes (3-cm in diameter) in their natural position (i.e., root down and shoot up). Before seedling transfer, 1.5 ml of sterile diH20 was added onto the top of the vermiculite. After transfer, the seedlings were gently covered with surrounding vermiculite. Test tubes were covered with lid to keep moisture for seeding to recover from transplanting and incubated in a growth chamber in the dark with the settings described above. The lid was removed the next day and the growth of seedlings was monitored every day for drought tolerance.

### Results

[0481] As shown in Table 5, Penicillium Strain B promoted wheat root (radical) and shoot growth three days after sowing on water agar, under normal watering and water-limited conditions.

### Example 6: Greenhouse Characterization

### Setup and Watering Conditions

[0482] A sandy loam growth substrate was mixed in the greenhouse and consisting of 60% loam and 40% mortar sand (Northeast Nursery, Peabody, Mass.). Prior to mixing, loam was sifted through a ⅜″ square steel mesh screen to remove larger particles and debris.

[0483] For greenhouse experiments, half of the nitrogen fertilizer (urea) and all phosphate (monoammonium phosphate, MAP) and potash to be applied during the season were added to the soil mixture prior to sowing. The remaining urea was provided dissolved in irrigation water at the onset of the reproductive stages of development. For soybean the total applied nutrients were 440 lbs/acre of urea, 38 lbs/MAP, and 105 lbs/acre potash. Substrate surface area per pot was calculated based on pot diameter in order to approximate the “acreage” of individual pots. An equivalent volume of fertilized soil was then gently added to each pot in order to minimize compaction of the soil. The substrate was saturated with water 3-4 hours before sowing.

[0484] Commercially available soybean seeds were coated with microbial treatments using the formulation used for field trials and described herein. Treatments included microbial coatings with the Penicillium strains Strain B and Strain F, and at least one non-endophyte control (non-treated, or formulation only-treated).

[0485] Three seeds were sown evenly spaced at the points of a triangle. Soil was then overlaid atop the seeds (estimated average planting depth at 1.0 to 1.5 inches) and an additional 700 mL water was added to moisten the overlaying substrate. Post-planting, the seeds were watered with 125 mL water per day. Pots were thinned down to 1 best seedling at true leaves stage (approximately 2 weeks).

[0486] The transplanting protocol for the seeds was as follows: Transplanting occurred at the time of thinning, to replace pots with no emergence or damaged plants with transplanted healthy plants of the same treatment in new pots. Three liters of the identical soil mix was added to the new pot. One plant was carefully removed from a healthy pot of the same treatment and placed in the new pot. The new pot was filled with soil to 4 L, with gentle packing around the roots. The new pot was watered with 700 mL water immediately after adding soil to each transplant. Transplanted seedlings were monitored for wilt and/or stress symptoms and delayed development. The original pots were retained in case the transplant became unhealthy.

[0487] Plants treated to the normal watering condition regime were watered with 125 mL water per day.

### Drought Stress Testing

[0488] Plants were provided with water to ˜50% capacity of the substrate for the first 14 days after sowing at which point water was withheld from water-stress plants until visible signs of wilting in vegetative tissues (i.e. drooping leaves and petioles, leaf rolling, chlorosis). Water-stressed plants were then irrigated to 50% soil water capacity, after which another drought cycle was initiated. Such drought cycles were continued until plants reached maturity. Throughout the experiment, the greenhouse was maintained on a 14-hour photoperiod where they were provided with at least 800 microE m̂-2 ŝ-1, ˜21° C. daytime and ˜18° C. nighttime temperatures and a relative humidity of ˜20-40%.

[0489] The watering regime for the drought-exposed seedlings was conducted as follows: approximately half saturation of soil at first day of emergence, third day of emergence, and 1 week later (day of thinning), full saturation at 5 days after thinning to initiate drought, full saturation to end drought when severe drought symptoms are observed, half saturation of soil maintained evenly (not cycling) until harvest.

### Scoring

[0490] The first day of emergence and final emergence at the true leaf stage were recorded. As follows: by the soy scale every 7 days; wilt score every other day; early pod count at 45 days post planting (average stage of 2-3 pods per plant) with length of each plant's longest pod providing a better predictive measurement than pod length, which was not found to correlate to yield; leaf count at 45 days post planting (found to correlate strongly to yield), yield as measured by final pod count, seed count, and dry seed weight at harvest, nodule count on roots, final dry biomass of plants (separating stems from roots and washing roots), temperature during greenhouse growth periods.

[0491] Seedlings were scored as follows:
[0492] Final Emergence: seedlings emerged at 12-13 days post planting, out of 3 seeds planted per pot
[0493] Pod Count: pods per plant, counted weekly after flowering but before maturity
[0494] Seed Pre-Count: seeds per plant, counted inside pods weekly before maturity
[0495] Seed Count, Mature: seeds per plant, harvested, mature
[0496] Seed Count, Mature+Immature: seeds per plant, harvested, mature and immature
[0497] Percent of Seeds That Are Mature: calculated from treatment averages, not per plant
[0498] Seed Weight, Mature: dry grams of seed per plant (dried 3 days at 50 degrees C.; mature only)
[0499] Wilt Scores: scored visually on a scale from 0=no wilt to 4=unrecoverable;

### Midseason Measurements and Harvest

[0500] For soybean, emergence percentage was observed. Further, at various times through the growing season, plants were assessed for pod length, pod number, relative chlorophyll content (SPAD), and total yield as mature seeds produced and seed fresh and dry mass. Soy was harvested at the point of agronomical relevance: senescence of pods.

[0501] To compare treated plants to controls, a fully Bayesian robust t-test was performed (Gelman, et al. 2013; Kruschke, 2012). Briefly, R (R Core Team, 2015) was used with the BEST package (Kruschke and Meredith, 2014) and JAGS (Plummer, 2003) to perform a Markov Chain Monte Carlo estimation of the posterior distribution the likely differences between the two experimental groups. A 95% highest density interval (HDI) was overlayed onto this distribution to aid in the interpretation of whether the two biological groups truly differ.

### Results

[0502] All results are shown in Table 6. Photographs of plants grown under water-limited conditions from seeds treated with the different Penicillium strains, as compared to plants grown from seed treated with the formulation control are shown in FIG. 7 (Strain A), FIG. 8 (Strain B), FIG. 9 (Strain D), FIG. 10 (Strain E), FIG. 11 (Strain F), and FIG. 12 (Strain G).

[0503] Plants grown from seeds treated with any of the following strains: Strain A, Strain B, Strain D, or Strain E, displayed the better measurable plant characteristics, including but not limited to better drought tolerance, increased pod counts, and final harvest yield, as compared to the plants grown from seeds treated with the Penicillium strains Strain F or Strain G.

[0504] Under normal watering (well watered) conditions as well as under water-limited (drought) conditions, Strain B imparted a number of improved agronomic characteristics to soybean plants grown from seeds that were inoculated with the Strain B formulation, vs. controls of isoline plants grown from seeds not inoculated with the fungal endophyte but instead treated with a formulation control (formulation components minus the fungal endophyte).

### Tissue Collection and Processing for Transcriptomics, Proteomics, Hormone, and Metabolomics Analysis

[0505] In order to assess the effects of Penicillium seed treatment on plant growth at the transcriptomic, proteomic, phytohormone, and metabolomic levels, soybean plants were harvested. Three pots from each treatment were selected. Once separated, the tissues (roots, stems, and leaves) from the three pots of each treatment were pooled. For collection, first all loosely attached substrate was removed from the roots by gently tapping and shaking the roots. Any adherent substrate was removed by submerging the roots in water and manually dislodging attached soil and debris. The roots were then blotted dry before being cut from the aerial tissue, followed by separating petioles and leaves from the stem. As tissues were removed from the plant they were immediately bagged and frozen in liquid nitrogen. All harvested tissues were kept in liquid nitrogen or stored at −80° C. until further processing.

[0506] To prepare for analyses, the tissues were ground with liquid nitrogen using a pre-chilled mortar and pestle. Approximately 100-200 micrograms of each ground sample pool was transferred to a chilled 1.5 mL microtube for RNA extraction and subsequent transcriptome, phytohormone and metabolite analysis. The remaining ground tissue was then transferred to a chilled 50 mL conical tube and stored in liquid nitrogen or at −80° C. until shipment for further analyses.

[0507] Transcriptomics analysis was performed as described in Example 8. Plant proteomics analysis was performed as described in Example 9. Hormone analysis was performed as described in Example 10. Metabolomics was performed as described in Example 11. Community sequencing microbiome profiles were analyzed as described in Example 12.

### Example 7: Assessment of Plant Colonization

[0508] The establishment of plant-microbe interactions is contingent on close proximity. The microbiome of the host plant consists of microorganisms inside tissues as well as those living on the surface and surrounding rhizosphere. The protocols described in this section allow confirmation of successful colonization of plants by endophytic fungi, for example by direct recovery of viable colonies from various tissues of the inoculated plant.

### Recovery of Viable Colonies

[0509] Seeds are surface-sterilized by exposing them to chlorine gas overnight, using the methods described elsewhere. Sterile seeds are then inoculated with submerged in 0.5 OD overnight cultures of fungi and allowed to briefly air dry. The seeds are then placed in tubes filled partially with a sterile sand-vermiculite mixture [(1:1 wt:wt)] and covered with 1 inch of the mixture, watered with sterile water, sealed and incubated in a greenhouse for 7 days. After incubation, various tissues of the plants are harvested and used as donors to isolate fungi by placing tissue section in a homogenizer (TSB 20%) and mechanical mixing. The slurry is then serially diluted in 10-fold steps to 10-3 and dilutions 1 through 10-3 are plated on TSA 20% plates (1.3% agar). Plates are incubated overnight and pictures are taken of the resulting plates as well as colony counts for CFU. Fungi are identified visually by colony morphotype and molecular methods described herein. Representative colony morphotypes are also used in colony PCR and sequencing for isolate identification via ribosomal gene sequence analysis as described herein. These trials are repeated twice per experiment, with 5 biological samples per treatment.

### Culture-Independent Methods to Confirm Colonization of the Plant or Seeds by Bacteria or Fungi

[0510] One way to detect the presence of endophytes on or within plants or seeds is to use quantitative PCR (qPCR). Internal colonization by the endophyte can be demonstrated by using surface-sterilized plant tissue (including seed) to extract total DNA, and isolate-specific fluorescent MGB probes and amplification primers are used in a qPCR reaction. An increase in the product targeted by the reporter probe at each PCR cycle therefore causes a proportional increase in fluorescence due to the breakdown of the probe and release of the reporter. Fluorescence is measured by a quantitative PCR instrument and compared to a standard curve to estimate the number of fungal or bacterial cells within the plant.

### EXPERIMENTAL DESCRIPTION

[0511] The design of both species-specific amplification primers, and isolate-specific fluorescent probes are well known in the art. Plant tissues (seeds, stems, leaves, flowers, etc.) are pre-rinsed and surface sterilized using the methods described herein.

[0512] Total DNA is extracted using methods known in the art, for example using commercially available Plant-DNA extraction kits, or the following method.

[0513] Tissue is placed in a cold-resistant container and 10-50 mL of liquid nitrogen is applied. Tissues are then macerated to a powder.

[0514] Genomic DNA is extracted from each tissue preparation, following a chloroform:isoamyl alcohol 24:1 protocol (Sambrook et al., 1989).

[0515] Quantitative PCR is performed essentially as described by Gao et al. (2010) with primers and probe(s) specific to the desired isolate using a quantitative PCR instrument, and a standard curve is constructed by using serial dilutions of cloned PCR products corresponding to the specie-specific PCR amplicon produced by the amplification primers. Data are analyzed using instructions from the quantitative PCR instrument's manufacturer software.

[0516] As an alternative to qPCR, Terminal Restriction Fragment Length Polymorphism, (TRFLP) can be performed, essentially as described in Johnston-Monje and Raizada (2011). Group specific, fluorescently labelled primers are used to amplify a subset of the microbial population, especially bacteria, especially fungi, especially archaea, especially viruses. This fluorescently labelled PCR product is cut by a restriction enzyme chosen for heterogeneous distribution in the PCR product population. The enzyme cut mixture of fluorescently labelled and unlabeled DNA fragments is then submitted for sequence analysis on a Sanger sequence platform such as the Applied Biosystems 3730 DNA Analyzer.

### Immunological Methods to Detect Microbes in Seeds and Vegetative Tissues

[0517] A polyclonal antibody is raised against specific fungal Penicillium strains via standard methods. A polyclonal antibody is also raised against specific GUS and GFP proteins via standard methods. Enzyme-linked immunosorbent assay (ELISA) and immunogold labeling is also conducted via standard methods, briefly outlined below.

[0518] Immunofluorescence microscopy procedures involve the use of semi-thin sections of seed or seedling or adult plant tissues transferred to glass objective slides and incubated with blocking buffer (20 mM Tris (hydroxymethyl)-aminomethane hydrochloride (TBS) plus 2% bovine serum albumin, pH 7.4) for 30 min at room temperature. Sections are first coated for 30 min with a solution of primary antibodies and then with a solution of secondary antibodies (goat anti-rabbit antibodies) coupled with fluorescein isothiocyanate (FITC) for 30 min at room temperature. Samples are then kept in the dark to eliminate breakdown of the light-sensitive FITC. After two 5-min washings with sterile potassium phosphate buffer (PB) (pH 7.0) and one with double-distilled water, sections are sealed with mounting buffer (100 mL 0.1 M sodium phosphate buffer (pH 7.6) plus 50 mL double-distilled glycerine) and observed under a light microscope equipped with ultraviolet light and a FITC Texas-red filter.

[0519] Ultrathin (50- to 70-nm) sections for TEM microscopy are collected on pioloform-coated nickel grids and are labeled with 15-nm gold-labeled goat anti-rabbit antibody. After being washed, the slides are incubated for 1 h in a 1:50 dilution of 5-nm gold-labeled goat anti-rabbit antibody in IGL buffer. The gold labeling is then visualized for light microscopy using a BioCell silver enhancement kit. Toluidine blue (0.01%) is used to lightly counterstain the gold-labeled sections. In parallel with the sections used for immunogold silver enhancement, serial sections are collected on uncoated slides and stained with 1% toluidine blue. The sections for light microscopy are viewed under an optical microscope, and the ultrathin sections are viewed by TEM.

### Example 8: Identification of Differentially Regulated Genes (Transcriptomics)

### Method: Qualitative Transcriptomics

[0520] For the first (qualitative) transcriptomics study, whole RNA was extracted from ground plant tissue over dry ice using the QIAgen Plant RNeasy mini kit (cat. no. 74904) per the manufacturer's instructions with minor modification. DNase treatment was performed on the column with the QIAgen RNase-free DNase kit (cat. no. 79254). The RW1 buffer wash was divided into two washes of half the buffer volume suggested by the manufacturer with the DNase treatment applied in between. After elution, RNA samples were kept on dry ice or at −20° C. until shipping. For transcriptome data acquisition, 1.5 micrograms of whole RNA was sent to Cofactor Genomics (St. Louis, Mo.).

[0521] To calculate expression values, transcript cDNA sequences were first aligned to the set of identified genes in the soy genome. Sequence read counts for each sample and gene were next normalized to account for differences in the number of reads per sample and differences in gene lengths. More specifically, raw sequence counts per gene were multiplied by a value representing the mean total number of reads aligned to the gene across all samples divided by the total number of aligned reads for a given sample. This value was then divided by the length of the gene it mapped to in order to eliminate gene length biases. The resulting values were considered to be the expression value.

[0522] The resulting expression values and their respective transcripts were filtered to reduce the influence of spurious observations. All observations with expression values lower than 10 were removed from downstream analysis. In addition, transcripts that mapped to genes without function information (i.e. ‘uncharacterized protein’) were not considered further. Fold changes between control and treated samples were calculated for each transcript by dividing the expression value from the treated sample by the expression value from the control sample. Gene ontology terms (functional categories) were determined for each transcript by referencing the Ensembl database (http://ensembl.gramene.org) using their respective genes.

### Method: Quantitative Transcriptomics

[0523] The second transcriptomics (quantitative) analyses were conducted on plants grown from seeds treated with a variety of Penicillium strains, and formulation control—treated plants. From this, up- and down-regulated transcripts in plants grown from seeds treated with each of the Penicillium strains were compared with the transcript profiles of plants grown from seeds treated the other strains and with the plants grown from seeds treated with only the formulation control.

[0524] The specific procedures used for the transcriptomics comparison analyses included the following parameters: FastQC v0.10.1 was run to verify quality of sequences (fastqc -o <Output directory> -t 4 <Sequence file>). TrimmomaticSE was run to remove TruSeq adapters (TrimmomaticSE -threads 4<Untrimmed filename> <Trimmed filename> ILLUMINACLIP:TruSeq3-SE.fa:2:30:10 LEADING:3 TRAILING:3 SLIDINGWINDOW:4:15 MINLEN:36). Quantification of reads mapped to each locus of the reference genome. The Glycine max Wm82.a2.v1 (Soybean) reference genome was download from Phytozome (phytozome.jgi.doe.gov). Prior to running STAR 2.5.lb_modified, a genome index was generated (STAR—runMode genomeGenerate—runThreadN 8—genomeDir <Output directory>—genomeFastaFiles Gmax_275_v2.0.fa—limitGenomeGenerateRAM 30000000000). Sequences were aligned to the reference genome using STAR 2.5.lb modified (STAR—genomeDir <Genome index directory>—runThreadN 40—readFilesIn <Trimmed seqs directory>—readFilesCommand zcat—outSAMtype BAM SortedByCoordinate—outFilterIntronMotifs RemoveNoncanonicalUnannotated). The .bam file was indexed using Samtools (samtools index <.bam file>). QC was performed on the .bam file using the RSeQC bam_stat.py utility (bam_stat.py -i <.bam file>><Output report file>). Reference genome annotation file Gmax_275_Wm82.a2.v1.gene_exons.gff was converted to a .gtf file containing just exon entries with gene_id parameter specifying the locus without specific transcript designation. This results in all reads mapping to the defined range being reported as part of this gene locus. htseq-count 0.6.1p1 was used to quantify the reads (htseq-count -f bam -s reverse <Mapped file from STAR> <.gtf file>> <counts.txt file>). Quantification of reads mapped to alternatively-spliced transcripts from the reference genome. Salmon 0.6.0 was run in quasi-mapping mode to quantify transcript-specific reads (salmon quant -i transcripts_index −1 SR -r <(gunzip -c <Sequence file>) -o <Quant file>). Differential expression analysis of reads mapped to each locus of the reference genome. Gene locus and transcript counts were run separately. Counts/Quant files for each sample were supplied to DESeq2, which generated log 2FoldChange values for each comparison between a rep and its formulation. Results with an absolute value of log 2FoldChange greater than 1.4 and a padj value less than 0.05 were considered high confidence hits.

[0525] To compare these results to qualitative results, the reference genome v2.0 gene was cross-referenced (using the Glyma_11 to Glyma_20 Correspondence_Full.csv file available at Soybase.org) to obtain the reference genome v1.1 gene. If this v1.1 gene was found in the qualitative results output (minus the transcript[.#] specification), the gene was flagged.

### Results: Transcriptomics Qualitative Analysis (Soy Normal Watering and Water-Limited Conditions)

[0526] All results are summarized in Table 7A.

[0527] The transcriptomic analysis of soybean plants inoculated with endophytic fungal strain Strain B grown under normal watering and water-limited regimes in the greenhouse revealed three major pathways that are modulated by the endophyte: symbiosis enhancement, growth promotion, and resistance against abiotic and biotic stresses.

[0528] The following transcripts were modulated in plants grown from seeds treated with Strain B under normal watering or water-limited conditions:

[0529] Transcriptomics Upregulated Root, normal watering regime: 18.5 kDa class I heat shock protein, Alcohol-dehydrogenase, Aldehyde dehydrogenase, Amidophosphoribosyltransferase (chloroplastic), Amine oxidase, Arginine decarboxylase, Asparagine synthetase, ATP synthase epsilon chain (chloroplastic), ATP synthase gamma chain, Beta-amyrin 24-hydroxylase, Beta-galactosidase, Calcium-binding EF-hand family protein, Calmodulin-2, Chalcone synthase 7, Chalcone—flavonone isomerase 1A, Chlorophyll a-b binding protein 2 (chloroplastic), Chlorophyll a-b binding protein 3 (chloroplastic), Cytochrome c oxidase subunit 1, DNA-directed RNA polymerase subunit, Early nodulin-36A, Early nodulin-70, Early nodulin-93, Ethylene-responsive element binding factor 4, Eukaryotic translation initiation factor 6, Ferritin, Ferritin-1 (chloroplastic), Flavonoid 4′-O-methyltransferase, Fructose-bisphosphate aldolase, Glutamine synthetase, Glutamine synthetase cytosolic isozyme 2, Glutathione peroxidase, Histone H4, HMG-Y-related protein A, Leghemoglobin A, Leghemoglobin C1, Leghemoglobin C2, Leghemoglobin C3, Lipase, Lipoxygenase, MLO-like protein, NAC domain protein, Nodulin-16, Nodulin-20, Nodulin-21, Nodulin-22, Nodulin-24, Nodulin-26, Nodulin-26B, Nodulin-44, Nodulin-051, Peptidyl-prolyl cis-trans isomerase, Phosphoribulokinase, photosystem I subunit F, Repetitive proline-rich cell wall protein 2, Ribulose bisphosphate carboxylase small chain 1 (chloroplastic), Ribulose bisphosphate carboxylase small chain 4 (chloroplastic), S-adenosylmethionine synthase, Serine hydroxymethyltransferase, Stress-induced protein SAM22, Superoxide dismutase, Thioredoxin.

[0530] Transcriptomics Upregulated Stem, normal watering regime: 18.5 kDa class I heat shock protein, 2-hydroxyisoflavanone synthase, Alcohol-dehydrogenase, Annexin, Asparagine synthetase, ATP synthase epsilon chain (chloroplastic), ATP synthase gamma chain, Calmodulin-2, Chalcone synthase 7, Chalcone—flavonone isomerase 1A, Chlorophyll a-b binding protein 2 (chloroplastic), Cytochrome P450 78A3, Cytochrome P450 monooxygenase CYP89H3, DNA-directed RNA polymerase, Early nodulin-36A, Ethylene-responsive element binding factor 4, Eukaryotic translation initiation factor 6, Ferritin, Ferritin-1 (chloroplastic), Ferritin-2 (chloroplastic), Glucose-1-phosphate adenylyltransferase, Glutamine synthetase, Glutathione peroxidase, Lipoxygenase, MLO-like protein, MYB transcription factor MYB187, NADPH—cytochrome P450 reductase, nine-cis-epoxycarotenoid dioxygenase 4, Non-specific lipid-transfer protein, S-adenosylmethionine synthase, Serine hydroxymethyltransferase, Serine/threonine-protein kinase, Thioredoxin, Tubulin beta-1 chain, UDP-glucose 6-dehydrogenase.

[0531] Transcriptomics Upregulated Leaf, normal watering regime: 2-hydroxyisoflavanone synthase, Alcohol-dehydrogenase, Amine oxidase, Annexin, Asparagine synthetase, Auxin-induced protein 15A, Beta-amyrin 24-hydroxylase, Beta-galactosidase, Calmodulin-2, Chalcone synthase 7, Chalcone—flavonone isomerase 1A, Cytochrome P450 77A3, Cytochrome P450 78A3, Cytochrome P450 monooxygenase CYP89H3, DNA-directed RNA polymerase, DNA-directed RNA polymerase subunit, Ethylene-responsive element binding factor 4, Eukaryotic translation initiation factor 6, Ferritin, Ferritin-1 (chloroplastic), Ferritin-2 (chloroplastic), Ferritin-4 (chloroplastic), Fructose-bisphosphate aldolase, Glucan endo-1,3-beta-glucosidase, Glutamate receptor, Lipoxygenase, Malic enzyme, MLO-like protein, Monosaccharide transporter, MYB transcription factor MYB187, NADPH—cytochrome P450 reductase, Non-specific lipid-transfer protein, Phospholipase D, Protein PsbN, Repetitive proline-rich cell wall protein 2, Repetitive proline-rich cell wall protein 3, S-adenosylmethionine synthase, Serine hydroxymethyltransferase, Signal recognition particle 9 kDa protein, Stress-induced protein SAM22, Superoxide dismutase, Thioredoxin, Tubulin beta-1 chain, Wound-induced protein.

[0532] Transcriptomics Downregulated Root, normal watering regime: 2-hydroxyisoflavanone synthase, 50S ribosomal protein L35, Amine oxidase, Annexin, Asparagine synthetase, Beta-galactosidase, Calmodulin-2, Cytochrome P450 78A3, Cytochrome P450 82A4, Cytochrome P450 93A3, DNA-directed RNA polymerase, Expansin, Ferritin-4 (chloroplastic), G2/mitotic-specific cyclin S13-6, G2/mitotic-specific cyclin S13-7, Histone H2A, Histone H2B, Histone H3, Histone H4, Lipase, Lipoxygenase, Malic enzyme, MLO-like protein, Monosaccharide transporter, NADPH—cytochrome P450 reductase, Non-specific lipid-transfer protein, Peptidyl-prolyl cis-trans isomerase, Peroxidase, Phospholipase D, Phosphomannomutase, Protein P21, Repetitive proline-rich cell wall protein 3, S-adenosylmethionine synthase, Serine hydroxymethyltransferase, Signal recognition particle 9 kDa protein, Stem 28 kDa glycoprotein, Stem 31 kDa glycoprotein, Superoxide dismutase, Thioredoxin, Tubulin beta-1 chain, UDP-glucose 6-dehydrogenase.

[0533] Transcriptomics Downregulated Stem, normal watering regime: 50S ribosomal protein L35, Aldehyde dehydrogenase, Amine oxidase, Annexin, Arginine decarboxylase, Asparagine synthetase, Auxin-induced protein 15A, Auxin-induced protein 6B, Auxin-induced protein X15, beta glucosidase 42, Beta-amyrin 24-hydroxylase, Beta-galactosidase, Calcium-binding EF-hand family protein, Chlorophyll a-b binding protein 2 (chloroplastic), Chlorophyll a-b binding protein 3 (chloroplastic), Cytochrome P450 77A3, DNA-directed RNA polymerase subunit, Ferritin, Ferritin-4 (chloroplastic), Fructose-bisphosphate aldolase, G2/mitotic-specific cyclin S13-6, G2/mitotic-specific cyclin S13-7, Histone H2A, Histone H2B, Histone H3, Histone H4, HMG-Y-related protein A, Lipase, Lipoxygenase, Malic enzyme, Monosaccharide transporter, Non-specific lipid-transfer protein, Pectinesterase, Peptidyl-prolyl cis-trans isomerase, Peptidyl-prolyl cis-trans isomerase 1, Peroxidase, Phosphomannomutase, Phosphoribulokinase, photosystem I subunit F, Repetitive proline-rich cell wall protein 2, Repetitive proline-rich cell wall protein 3, Ribulose bisphosphate carboxylase small chain 1 (chloroplastic), Ribulose bisphosphate carboxylase small chain 4 (chloroplastic), RuBisCO-associated protein, S-adenosylmethionine synthase, Stem 31 kDa glycoprotein, Stress-induced protein SAM22, Superoxide dismutase, Thioredoxin, Uracil-DNA glycosylase.

[0534] Transcriptomics Downregulated Leaf, normal watering regime: 18.5 kDa class I heat shock protein, 50S ribosomal protein L35, Aldehyde dehydrogenase, Arginine decarboxylase, Asparagine synthetase, ATP synthase epsilon chain (chloroplastic), ATP synthase gamma chain, Auxin-induced protein 15A, Auxin-induced protein 6B, Auxin-induced protein X15, beta glucosidase 42, Beta-galactosidase, Calcium-binding EF-hand family protein, Calmodulin-2, Chlorophyll a-b binding protein 2 (chloroplastic), Chlorophyll a-b binding protein 3 (chloroplastic), Early nodulin-36A, Fructose-bisphosphate aldolase, G2/mitotic-specific cyclin S13-7, Glutamine synthetase, Glutathione peroxidase, Histone H2A, Histone H2B, Histone H3, Histone H4, HMG-Y-related protein A, Lipoxygenase, nine-ci s-epoxycarotenoid dioxygenase 4, Non-specific lipid-transfer protein, Pectinesterase, Peptidyl-prolyl cis-trans isomerase, Peptidyl-prolyl cis-trans isomerase 1, Phosphomannomutase, Phosphoribulokinase, photosystem I subunit F, Protein P21, Ribulose bisphosphate carboxylase small chain, Ribulose bisphosphate carboxylase small chain 1 (chloroplastic), Ribulose bisphosphate carboxylase small chain 4 (chloroplastic), RuBisCO-associated protein, S-adenosylmethionine synthase, Serine hydroxymethyltransferase, Serine/threonine-protein kinase, Stem 31 kDa glycoprotein, Thioredoxin, UDP-glucose 6-dehydrogenase, Uracil-DNA glycosylase.

[0535] Transcriptomics Upregulated Root, water-limited watering regime: 50S ribosomal protein L35, Alcohol-dehydrogenase, Aldehyde dehydrogenase, Amine oxidase, Annexin, Asparagine synthetase, ATP synthase gamma chain, beta glucosidase 42, Beta-amyrin 24-hydroxylase, Beta-galactosidase, Calcium-binding EF-hand family protein, Calmodulin-2, Chlorophyll a-b binding protein 2 (chloroplastic), Chlorophyll a-b binding protein 3 (chloroplastic), Cytochrome P450 78A3, Cytochrome P450 93A3, Early nodulin-36A, Ethylene-responsive element binding factor 4, Flavonoid 4′-O-methyltransferase, Fructose-bisphosphate aldolase, Glutathione peroxidase, Histone H2A, Histone H2B, Histone H3, Histone H4, Lipase, Lipoxygenase, MLO-like protein, Monosaccharide transporter, NAC domain protein, nine-cis-epoxycarotenoid dioxygenase 4, Nodulin-26, Non-specific lipid-transfer protein, Pectinesterase, Peptidyl-prolyl cis-trans isomerase, Peptidyl-prolyl cis-trans isomerase 1, Peroxidase, Phospholipase D, Phosphoribulokinase, photosystem I subunit F, Repetitive proline-rich cell wall protein 2, Repetitive proline-rich cell wall protein 3, Ribulose bisphosphate carboxylase small chain 1 (chloroplastic), Ribulose bisphosphate carboxylase small chain 4 (chloroplastic), Serine hydroxymethyltransferase, Serine/threonine-protein kinase, Stress-induced protein SAM22, Superoxide dismutase, Thioredoxin, Tubulin beta-1 chain, UDP-glucose 6-dehydrogenase.

[0536] Transcriptomics Upregulated Stem, water-limited watering regime: 50S ribosomal protein L35, Alcohol-dehydrogenase, Aldehyde dehydrogenase, Amine oxidase, Annexin, Arginase, Arginine decarboxylase, ATP synthase epsilon chain (chloroplastic), Auxin-induced protein 15A, Auxin-induced protein 6B, Auxin-induced protein X15, beta glucosidase 42, Beta-amyrin 24-hydroxylase, Calcium-binding EF-hand family protein, Calmodulin-2, Chalcone—flavonone isomerase 1A, Chlorophyll a-b binding protein 2 (chloroplastic), Chlorophyll a-b binding protein 3 (chloroplastic), Cytochrome P450 78A3, Cytochrome P450 monooxygenase CYP89H3, DNA-directed RNA polymerase subunit, Early nodulin-36A, Ethylene-responsive element binding factor 4, Ferritin, Ferritin-1 (chloroplastic), Ferritin-2 (chloroplastic), Ferritin-4 (chloroplastic), Fructose-bisphosphate aldolase, G2/mitotic-specific cyclin 513-6, G2/mitotic-specific cyclin 513-7, Glutathione peroxidase, Histone H2A, Histone H2B, Histone H3, Histone H4, HMG-Y-related protein A, Malic enzyme, Monosaccharide transporter, Non-specific lipid-transfer protein, Peptidyl-prolyl cis-trans isomerase, Peptidyl-prolyl cis-trans isomerase 1, Peroxidase, Phenylalanine ammonia-lyase, photosystem I subunit F,Repetitive proline-rich cell wall protein 2, Ribulose bisphosphate carboxylase small chain 1 (chloroplastic), Ribulose bisphosphate carboxylase small chain 4 (chloroplastic), S-adenosylmethionine synthase, Signal recognition particle 9 kDa protein, Superoxide dismutase, Thioredoxin, Tubulin beta-1 chain, UDP-glucose 6-dehydrogenase, Uracil-DNA glycosylase.

[0537] Transcriptomics Upregulated Leaf, water-limited watering regime: 2-hydroxyisoflavanone synthase, 3-ketoacyl-CoA synthase, 50S ribosomal protein L35, Alcohol-dehydrogenase, Aldehyde dehydrogenase, Amine oxidase, Annexin, Arginase, Asparagine synthetase, beta glucosidase 42,Beta-amyrin 24-hydroxylase, Calcium-binding EF-hand family protein, Calmodulin-2, CASP-like protein 10, Chalcone synthase 7, Chalcone—flavonone isomerase 1A, Chlorophyll a-b binding protein 2 (chloroplastic), Chlorophyll a-b binding protein 3 (chloroplastic), Cytochrome P450 77A3, DNA-directed RNA polymerase subunit, Ethylene-responsive element binding factor 4, Eukaryotic translation initiation factor 6, Ferritin-1 (chloroplastic), Flavonoid 4′-O-methyltransferase, Fructose-bisphosphate aldolase, Glucan endo-1,3-beta-glucosidase, Glutathione peroxidase, Histone H2A, Histone H2B, Histone H3, Histone H4, HMG-Y-related protein A, Lipoxygenase, Malic enzyme, MLO-like protein, Monosaccharide transporter, MYB transcription factor MYB187, NAC domain protein, Non-specific lipid-transfer protein, Peptidyl-prolyl cis-trans isomerase, Phospholipase D, Phosphomannomutase, Phosphoribulokinase, Ribulose bisphosphate carboxylase small chain, Ribulose bisphosphate carboxylase small chain 1 (chloroplastic), Ribulose bisphosphate carboxylase small chain 4 (chloroplastic), S-adenosylmethionine synthase, Serine/threonine-protein kinase, Signal recognition particle 9 kDa protein, Stress-induced protein SAM22, Superoxide dismutase, Superoxide dismutase, Thioredoxin, Tubulin beta-1 chain, UDP-glucose 6-dehydrogenase, Uracil-DNA glycosylase.

[0538] Transcriptomics Downregulated Root, water-limited watering regime: 18.5 kDa class I heat shock protein, 2-hydroxyisoflavanone synthase, Arginine decarboxylase, Asparagine synthetase, ATP synthase epsilon chain (chloroplastic), Chalcone synthase 7, Chalcone—flavonone isomerase 1A, Cytochrome P450 82A4, DNA-directed RNA polymerase, DNA-directed RNA polymerase subunit, Eukaryotic translation initiation factor 6, Ferritin, Ferritin-1 (chloroplastic), Ferritin-2 (chloroplastic), Ferritin-4 (chloroplastic), G2/mitotic-specific cyclin S13-6, G2/mitotic-specific cyclin S13-7, Glutathione peroxidase, Histone H2A, Histone H2B, Histone H3, Histone H4, HMG-Y-related protein A, Lipase, Lipoxygenase, Malic enzyme, MLO-like protein, NADPH—cytochrome P450 reductase, Nodulin-16, Nodulin-20, Nodulin-21, Nodulin-22, Nodulin-24, Nodulin-44, Nodulin-C51, Peptidyl-prolyl cis-trans isomerase, Phosphomannomutase, S-adenosylmethionine synthase, Signal recognition particle 9 kDa protein, Superoxide dismutase, Superoxide dismutase, Thioredoxin.

[0539] Transcriptomics Downregulated Stem, water-limited watering regime: 18.5 kDa class I heat shock protein, 2-hydroxyisoflavanone synthase, 3-ketoacyl-CoA synthase, Aldehyde dehydrogenase, Amine oxidase, Annexin, Apocytochrome f, Asparagine synthetase, ATP synthase gamma chain, Beta-galactosidase, Chalcone synthase 7, Cytochrome P450 77A3, DNA-directed RNA polymerase, Eukaryotic translation initiation factor 6, Fructose-bisphosphate aldolase, Glutamine synthetase, Glutathione peroxidase, Lipoxygenase, MLO-like protein, MYB transcription factor MYB187, NADPH—cytochrome P450 reductase, nine-cis-epoxycarotenoid dioxygenase, Non-specific lipid-transfer protein, Pectinesterase, Peptidyl-prolyl cis-trans isomerase, Phosphomannomutase, Phosphoribulokinase, Photosystem II reaction center protein J, Photosystem II reaction center protein Z, Repetitive proline-rich cell wall protein 3, RuBisCO-associated protein, S-adenosylmethionine synthase, Serine hydroxymethyltransferase, Serine/threonine-protein kinase, Stress-induced protein SAM22, Superoxide dismutase, Thioredoxin.

[0540] Transcriptomics Downregulated Leaf water-limited watering regime: 18.5 kDa class I heat shock protein, Acetolactate synthase, Aldehyde dehydrogenase, Apocytochrome f, Arginine decarboxylase, Asparagine synthetase, ATP synthase epsilon chain (chloroplastic), ATP synthase gamma chain, Auxin-induced protein 15A, Auxin-induced protein 6B, Beta-galactosidase, Cytochrome b6, Cytochrome P450 78A3, Cytochrome P450 monooxygenase CYP89H3, DNA-directed RNA polymerase, Early nodulin-36A, Ferritin, Ferritin-2 (chloroplastic), Ferritin-4 (chloroplastic), Fructose-bisphosphate aldolase, Glutamate receptor, Glutamine synthetase, Lipoxygenase, MLO-like protein, NADPH—cytochrome P450 reductase, nine-cis-epoxycarotenoid dioxygenase 4,Nitrate reductase, Non-specific lipid-transfer protein, Peptidyl-prolyl cis-trans isomerase, Peptidyl-prolyl cis-trans isomerase 1, photosystem I subunit F,Photosystem II reaction center protein J, Repetitive proline-rich cell wall protein 2, Ribose-phosphate pyrophosphokinase, RuBisCO-associated protein, S-adenosylmethionine synthase, Serine hydroxymethyltransferase, Site-determining protein, Thioredoxin.

### Symbiosis Enhancement

### Nodulation

[0541] Nodulin-encoding genes are specifically expressed during the development of symbiotic root nodules (Legocki and Verma, 1980). Upon nodule formation bacteria differentiate into nitrogen-fixing bacteroids that are beneficial to the plants (Kereszt et al., 2011). Nodulin proteins serve transport and regulatory functions in symbiosis (Fortin et al., 1985). Under normal watering, nodulins 16, 20, 21, 22, 24, 26, 26B, 44, and C51, and early nodulins 36A, 70, and 93 were upregulated in roots. Under drought conditions, nodulins 16, 20, 22, 24, 44, and C51 were downregulated in roots.

[0542] Leghemoglobin biosynthesis genes are involved in nodulation, specifically in providing oxygen flux to the respiring bacteroids (Appleby, 1984). Under normal watering, leghemoglobins A, C1, C2, and C3 were upregulated in roots. Under drought conditions, leghemoglobins A, C1, C2, and C3 were downregulated in roots.

[0543] Flavonoids are secondary metabolites that have many functions in higher plants, including UV protection, fertility, antifungal defense and the recruitment of nitrogen-fixing bacteria (Dao et al., 2011). The chalcone precursor of the flavonoids is synthesized by chalcone synthase, and isomerized to yield a flavanone by chalcone flavanone isomerase, followed by further enzymatic modifications (Dao et al., 2011). Under normal watering, chalcone synthase 7 (CHS7) and 2-hydroxyisoflavanone synthase (IFS2) were upregulated in leaves, and flavonoid 4′-O-methyltransferase was upregulated in roots. Under drought conditions, chalcone-flavanone isomerase 1A (CHI-1A) and flavonoid 4′-O-methyltransferase were upregulated in leaves.

[0544] Chloroplastic amidophosphoribosyltransferase is the first enzyme in de novo purine biosynthesis (Ito et al., 1994). It is associated with maturation of nodules in soybean and moth-bean (Vigna aconitifolia) (Kim et al., 1995). Under normal watering, chloroplastic amidophosphoribosyltransferase (PURI) was upregulated in roots.

[0545] Malic enzyme has been shown to be important for carbon metabolism of bacteroids and free living bacteria by supplying acetyl-CoA for the TCA cycle or providing NADPH and pyruvate for various biosynthetic pathways (Dao et al., 2008). Soybean plants inoculated with a NAD(+)-dependent malic enzyme mutant formed small root nodules and exhibited significant nitrogen-deficiency symptoms (Dao et al., 2008). Under normal watering, malic enzyme was upregulated in leaves.

### Nitrogen Metabolism

[0546] In most legumes, asparagine is the principal assimilation product of symbiotic nitrogen fixation (Scott et al., 1976). In soybean, high asparagine synthetase transcript level in source leaves is positively correlated with protein concentration of seed (Wan et al., 2006), and in roots, is linked with increased levels of asparagine in xylem sap transported to the shoot (Antunes et al., 2008). Under normal watering, two asparagine synthetase transcripts were upregulated in stems and leaves. In a comparison of drought and normal watering, three other asparagine synthetase transcripts were more upregulated by Strain B in stems under drought than under normal watering.

[0547] Glutamine and glutamate synthetases are enzymes responsible for assimilation of fixed ammonia during nitrogen fixation (Lara et al., 1983). In common bean (Phaseolus vulgaris) and in soy, nodule-specific forms of glutamine synthetase are produced in rhizobia-colonized nodules (Lara et al., 1983; Sengupta-Gopalan and Pitas, 1986), highlighting the enzyme's role in symbiosis. Under normal watering, glutamine synthetase and glutamine synthetase cytosolic isozyme 2 (GSGME) were upregulated in roots.

### Growth Promotion

### Carbon Metabolism and Photosynthesis

[0548] S-adenosylmethionine synthase, which catalyzes synthesis of s-adenosylmethionine from methionine and ATP, functions as a primary methyl-group donor and as a precursor for metabolites such as ethylene, polyamines, and vitamin B1 (Hesse et al., 2004). Under normal watering, one S-adenosylmethionine synthase transcript was upregulated in roots. Under drought conditions, a second S-adenosylmethionine synthase transcript was upregulated in leaves. In a comparison of drought and normal watering, this second transcript was more upregulated by Strain B in leaves under drought than under normal watering. Under normal watering, S-adenosylmethionine synthase was downregulated in roots.

[0549] Beta-galactosidase is a key enzyme in carbohydrate metabolism (Seki et al., 2002). Under normal watering, beta-galactosidase was upregulated in roots. In a comparison of drought and normal watering, four other beta-galactosidase transcripts were more upregulated by Strain B in roots under drought than under normal watering.

[0550] Phosphorylase, an enzyme that catalyzes the addition of a phosphate group from an inorganic phosphate to an acceptor, is an important allosteric enzyme in carbohydrate metabolism (Madsen, N. B, 1986). Under normal watering, two transcripts for phosphorylase were upregulated in stems.

[0551] Fructose-bisphosphate aldolase is a glycolytic enzyme, induced by the plant hormone gibberellin, that may regulate the vacuolar H-ATPase-mediated control of cell elongation that determines root length (Konishi et al., 2005). Four fructose-bisphosphate aldolase transcripts were notably upregulated in a tissue- and condition-specific manner. Under normal watering, two fructose-bisphosphate aldolase transcripts were upregulated in roots. Under drought conditions, these two transcripts and one additional fructose-bisphosphate aldolase transcript were upregulated in roots. In a comparison of drought and normal watering, all three of these transcripts were more upregulated by Strain B in roots and a fourth fructose-bisphosphate aldolase transcripts was more upregulated by Strain B in leaves under drought than under normal watering.

[0552] Glucose-1-phosphate adenylyltransferase, a transferase that transfers phosphorous-containing nucleotide groups, is involved in starch and sucrose metabolism (Ghosh and Preiss, 1966). Five transcripts encoding for glucose-1-phosphate adenylyltransferase were highly upregulated in stems of Strain B-treated plants grown under normal watering regime.

[0553] A hallmark of vascular plants is that photosynthetic, green source tissues produce sugars and assimilate inorganic nitrogen, and transport an excess to non-photosynthetic sink tissues such as roots and reproductive organs (Giaquinta, 1983). Several sugar transporters were identified and characterized in plants (Sauer and Tanner, 1993). Monosaccharide transporters are primarily transcribed in sink tissues such as young leaves, storage tissues, and floral organs (Sauer and Tanner, 1993). The monosaccharide transporters typically function as high affinity monosaccharide proton co-transporters in plants, since they transport pentoses and various hexoses (Buttner, 2010). Under drought conditions, monosaccharide transporter 1 (MST1) was upregulated in leaves.

[0554] Phosphoribulokinase catalyzes the ATP-dependent phosphorylation of D-ribulose 5-phosphate to form D-ribulose 1,5-bisphosphate, the photosynthetic CO2 acceptor. In higher plants this enzyme is one of the target enzymes of the ferredoxin/thioredoxin system (Buchanan, 1980). Under drought conditions, two transcripts for phosphoribulokinase were upregulated in roots. In a comparison of drought and normal watering, these transcripts were more upregulated by Strain B in roots under drought than under normal watering.

[0555] In plants, serine hydroxymethyltransferase is a key respiratory enzyme in the mitochondria, converting glycine to serine (Ho and Saito, 2001). As glycine is a photorespiration product in C3 plants, serine hydroxymethyltransferase participates in the photorespiration pathway in the leaves (McClung et al., 2000; Prabhu et al., 1998), where it may contribute to resistance to biotic and abiotic stress (Moreno et al., 2005). Five serine hydroxymethyltransferase transcripts were notably upregulated in a tissue- and condition-specific manner. Under normal watering, one serine hydroxymethyltransferase transcript was upregulated in both stems and leaves, and another in leaves only. Under drought conditions, two other serine hydroxymethyltransferase transcripts were upregulated in roots. In a comparison of drought and normal watering, one of these latter was more upregulated by Strain B in roots and an additional fifth serine hydroxymethyltransferase transcript was more upregulated by Strain B in leaves under drought than under normal watering.

[0556] ATP synthase provides energy to the cell through the synthesis of adenosine triphosphate (ATP) from adenosine diphosphate (ADP) and inorganic phosphate (Pi). The ATP produced by the light reactions is then used by the dark reactions of photosynthesis to reduce CO2 to carbohydrates (McCarty, 1992). Changes in ATP synthase contents have been reported in response to changes in light intensity (Anderson et al., 1988), leaf age (Schottler et al., 2007), and drought stress (Kohzuma et al., 2009). Under drought conditions, ATP synthase gamma chain (ATPC) was upregulated in roots. In a comparison of drought and normal watering, this transcript was more upregulated by Strain B in roots under drought than under normal watering.

[0557] The chloroplastic ATP synthase epsilon chain generates ATP from ADP and inorganic phosphate using energy derived from a trans-thylakoidal electrochemical proton gradient (Cruz et al., 1995). Under normal watering, chloroplastic ATP synthase epsilon chain (ATPE) was upregulated in roots.

[0558] Chlorophyll a-b binding proteins (CABs) are protective components of the photosynthetic light harvesting system known to participate in drought responses (Fang and Xiong, 2014). Under both normal and drought conditions, chloroplastic chlorophyll a-b binding proteins 2 (CAB2/LHCB1-7) and 3 (CAB3) were upregulated in roots. In a comparison of drought and normal watering, both CAB transcripts were more upregulated by Strain B in roots and CAB2 was also more upregulated by Strain B in leaves under drought than under normal watering.

[0559] Photosystem I subunit F (PSAF) promotes efficiency of electron transfer from plastocyanin to P700 (Haldrup et al., 2000) and has been shown to be upregulated in response to cold stress (Batista-Santos et al., 2011). Under drought conditions, photosystem I subunit F (PSAF) was upregulated in roots. In a comparison of drought and normal watering, this transcript was more upregulated by Strain B in roots under drought than under normal watering.

[0560] The photosystem II complex initiates photosynthesis by catalyzing electron transfer from water to the electron transport chain (Suorsa et al., 2004). The low molecular weight photosystem II-associated trans-membrane protein N participates in assembly and photoinhibition repair of the photosystem II reaction center (Torabi et al., 2014). Under normal watering, photosystem II protein N (PsbN) was upregulated in leaves. Under drought conditions, the photosystem II reaction center protein J (PsbJ) was downregulated in stems and leaves, and photosystem II reaction center protein Z (PsbZ) was downregulated in stems.

[0561] The cytochrome b6f complex, highly conserved across plants, algae, and cyanobacteria (Sainz et al., 2000), is key to the electron transfer chain of photosynthesis (Allen, 2004). Under drought conditions, apocytochrome f, the precursor of cytochrome prior to heme binding (Kuras et al., 1995) and cytochrome b6 were downregulated in stems and leaves.

[0562] A non-enzymatic, narbonin-like RuBisCO complex protein (RCP) was reported to accumulate in leaves following pod removal, but there is no evidence that it shares narbonin's role in storage and its function remains unknown (Mahato et al., 2004; Staswick, 1997; Staswick et al., 1994). Under normal watering, this RuBisCO-associated protein was downregulated in stems.

[0563] Cytochrome c oxidase is a multimeric complex composed of several different subunits (Capaldi, 1990). Subunits I, II and III are encoded by the mitochondrial genome (Unseld et al., 1997), while the other subunits are encoded in the nuclear genome and imported into the mitochondria post-translationally (Newton, 1988). Cytochrome c oxidase complex catalyzes the transfer of electrons from cytochrome c to molecular oxygen (Michel et al., 1998). It has been shown that the genetic components of the cytochrome c-dependent pathway are similarly regulated by carbon and nitrogen sources (Curi et al., 2003) and that their expression can be tissue-specific (Smart et al., 1994; Ribichich et al., 2001). The mitochondrial gene for subunit I (cox1) from soybean has been previously isolated (Grabau, 1986). Our data demonstrates that under normal watering, cytochrome c oxidase subunit 1 (COX1) was upregulated in roots.

[0564] Ribulose-1,5-bisphosphate carboxylase catalyzes the carboxylation and hydrolytic cleavage of ribulose-1,5-bisphosphate, the primary event in carbon fixation. In vascular plants, the small subunit of ribulose-1,5-bisphosphate carboxylate (RuBPCss) is encoded by the nuclear genome while the large subunit is encoded in the chloroplast genome (Kawashima and Wildman, 1972). Ribulose bisphosphate carboxylase small chain 3A has been reported to contribute to rapid increases in the amount of cytoplasmic soluble sugars present at the early stage of cold exposure (Grimaud et al., 2013). Under both normal and drought conditions, chloroplastic ribulose bisphosphate carboxylase small chains 1 and 4 were upregulated in roots. In a comparison of drought and normal watering, these transcripts were more upregulated by Strain B in roots, and these transcripts and an additional ribulose bisphosphate carboxylase small chain transcript were more upregulated by Strain B in leaves under drought than under normal watering.

[0565] Chloroplastic 50S ribosomal proteins are subunits forming the ribosome, involved in synthesis of organelle-specific proteins in the chloroplast (Bartsch et al., 1982). In a comparison of drought and normal watering, 50S ribosomal protein L35 was more upregulated by Strain B in stems under drought than under normal watering.

### Cell Wall

[0566] Amine oxidase generates hydrogen peroxide that is important for lignification of cortical cell wall and xylem tissue under both stress and normal conditions (Angelini et al., 1993). Four amine oxidase transcripts were notably upregulated in a tissue- and condition-specific manner. Under normal watering, one anime oxidase transcript was upregulated in roots. Under both normal watering and drought conditions, a second amine oxidase transcript was upregulated in leaves. In a comparison of drought and normal watering, this second amine oxidase transcript was more upregulated by Strain B in leaves, a third transcript in stems, and a fourth in roots, under drought than under normal watering. Under drought conditions, amine oxidase was downregulated in stems.

[0567] Pectinesterase is an enzyme involved in cell wall modification during growth, biotic stress, and nodule formation (Caffall and Mohnen, 2009; Carvalho et al., 2013; Zhang et al., 2015). Under drought conditions, pectinesterase was upregulated in roots.

[0568] In plants, peroxidases are involved in cell wall lignification, usually associated with pathogen resistance (Bruce and West, 1989), abiotic stress (Huttova et al., 2006; Quiroga et al., 2001), or cell wall modification during growth (Van Hoof and Gaspar, 1976; Kukavica et al., 2012). In a comparison of drought and normal watering, peroxidase (GM-IPER1) was more upregulated by Strain B in stems under drought than under normal watering.

[0569] UDP-glucose 6-dehydrogenase is an enzyme that participates in cell wall formation and modification by providing UDP-glucuronate for polysaccharide biosynthesis (Cook et al., 2012). In a comparison of drought and normal watering, UDP-glucose 6-dehydrogenase was more upregulated by Strain B in roots under drought than under normal watering.

[0570] There is an evidence to suggest that CASP-like proteins build transmembrane scaffolds for localization of proteins and modification of the cell wall, important in directing the growth of some specialized tissues (Roppolo et al., 2014). In Arabidopsis, CASP-like proteins demonstrated tissue-specific expression in trichome cells, abscission zone cells, root cap cells, and xylem pole pericycle cells (Roppolo et al., 2014). Under drought conditions, CASP-like protein 10 was upregulated in leaves.

[0571] Expansin acts during growth to loosen the cell wall polysaccharide network (Cosgrove, 2000), permitting growth but increasing vulnerability to pathogen infection (Ding et al., 2008). Under normal watering, expansin was downregulated in roots.

### Development and Regulation

[0572] DNA-directed RNA polymerase is responsible for transcription of DNA sequences to mRNA transcripts (Azuma et al., 1991; Kollmar and Farnham, 1993). Under drought conditions, a DNA-directed RNA polymerase subunit was upregulated in leaves. Under drought conditions, a DNA-directed RNA polymerase was downregulated in leaves.

[0573] Eukaryotic initiation factor 6 is a regulator of ribosome biogenesis and protein translation (Guo et al., 2013). Recent studies have shown that this gene is predominately expressed in meristem and lateral roots, and it may play a critical role in growth and development through involvement in ribosome biogenesis in these tissues (Kato et al., 2010). Under normal watering, eukaryotic translation initiation factor 6 was upregulated in stems. G2/mitotic-specific cyclin S13 is essential for the control of the cell cycle at the G2/M (mitosis) transition (Hata et al., 1991). G2/mitotic-specific cyclin S13-6 was found to be upregulated in response to high temperature and humidity stress during soybean seed development (Wang et al., 2012). In a comparison of drought and normal watering, G2/mitotic-specific cyclin S13-6 and -7 were more upregulated by Strain B in stems under drought than under normal watering.

[0574] Histones are primarily involved in DNA packaging into chromatin, a process that modifies gene expression. Recent studies show that the developmental transition from a vegetative to a reproductive phase (i.e. flowering) is controlled by chromatin modifications (He, 2009). Under drought conditions, 3 histone H2A transcripts, 4 histone H3 transcripts, and 1 histone H4 transcript were upregulated in stems and 3 histone H2A transcripts, 2 histone H2B transcripts, 7 histone H3 transcripts, and 6 histone H4 transcripts were upregulated in leaves. In a comparison of drought and normal watering, all of these and an additional 55 histone transcripts were more upregulated by Strain B in stems and leaves under drought than under normal watering.

[0575] An HMG-Y-related protein A gene, related to the “high mobility group” (HMG) chromatin proteins involved in gene regulation via recognition and modulation of both DNA and chromatin structure (Bustin and Reeves, 1996), has been isolated in soy (Laux et al., 1991). The presence of both a HMG-Y-like DNA binding domain and a histone H1 domain suggests that it may interact with histones in chromatin (Laux et al., 1991). In a comparison of drought and normal watering, HMG-Y-related protein A was more upregulated by Strain B in stems and leaves under drought than under normal watering.

[0576] Uracil-DNA glycosylase, an enzyme present across eukaryotes, participates in DNA repair, specifically by excising uracil bases incorporated mistakenly during replication or due to damage (Cordoba-Cañero et al., 2010). In a comparison of drought and normal watering, uracil-DNA glycosylase was more upregulated by Strain B in stems under drought than under normal watering.

[0577] In higher plants, signal-recognition-particle (SRP) assembly has a crucial role in targeting chloroplast nuclear- and plastome-encoded proteins toward the proper cellular compartment in chloroplast (Halic et al., 2004; Ferro et al., 2010). In eukaryotes, the SRP contains six proteins (SRP9, SRP14, SRP19, SRP54, SRP68, SRP72) (ZWIEB et al., 2005). Our data shows that under drought conditions, signal recognition particle 9 kDa protein SRP9 was upregulated in leaves.

[0578] Auxin directs cell elongation by stimulating cell wall-loosening factors (Friml, 2003). This is consistent with reports that increased seed germination, shoot growth and seed production have been accompanied by increased production of auxin-like compounds (Friml, 2003). In addition, Nod-factor independent nodulation is mediated in legumes through control of development of nodule primordia by varying concentrations of the plant hormones auxins, cytokinin, and ethylene (Schultze and Kondorosi, 1998). Under drought conditions, auxin-induced proteins 15A and 6B were upregulated in stems. In a comparison of drought and normal watering, both auxin-induced protein transcripts were more upregulated by Strain B in stems under drought than under normal watering.

[0579] Tubulin beta-1 chain (TUBB1) is involved in plant cell growth (Takahashi et al., 1995) and has been shown to accumulate in roots (Oppenheimer et al., 1988). Under normal watering, tubulin beta-1 chain (TUBB1) was upregulated in leaves.

[0580] The nine-cis-epoxycarotenoid dioxygenase family of enzymes catalyze a key step in biosynthesis of abscisic acid, the plant hormone responsible for growth regulation under stress conditions (Priya and Siva, 2015). Under drought conditions, nine-cis-epoxycarotenoid dioxygenase 4 (NCED4) was upregulated in roots.

[0581] NAC domain proteins are homologous to well-known Arabidopsis transcription factors that regulate the differentiation of xylem vessels and fiber cells (Ooka et al., 2003). Under drought conditions, NAC domain protein 32 (NAC32) was upregulated in leaves.

[0582] The cytochrome P450 CYP78 family participates in biosynthesis of a growth factor associated with apical meristem development and flower and fruit size (Eriksson et al., 2010; Kazama et al., 2010). Under normal watering, cytochrome P450 78A3 (CYP78A3) was upregulated in leaves. Under drought conditions, cytochrome P450 78A3 (CYP78A3) was upregulated in stems.

[0583] Acetolactate synthase catalyzes formation of the precursors of branched-chain amino acids (Chipman et al., 1998). Sulfonylurea herbicides inhibit the action of acetolactate synthase (Walter et al., 2014). Under drought conditions, acetolactate synthase was downregulated in leaves.

[0584] Division of chloroplasts relies on a site-determining protein homologous to MinD in prokaryotes, which positions the plastid-division apparatus necessary to initiate binary fission (Colletti et al., 2000). Under drought conditions, site-determining protein was downregulated in leaves.

### Resistance to Abiotic and Biotic Stresses

### Abiotic Stresses

[0585] Plant protection against oxidative damage is regulated through enzymatic and non-enzymatic mechanisms. Superoxide dismutase (SOD) is a detoxification enzymes that catalyzes the dismutation of superoxide (O2-) to hydrogen peroxide (H2O2), which peroxidases (PDX) then reduce to water (Matamoros et al., 2003). SOD is specifically highly upregulated in plants grown under drought that show higher expression of nodulation genes. This is consistent with the literature showing that SOD plays a major role in maintaining nodule integrity via controlling ROS overproduction to prevent oxidative damage (Chihaoui et al., 2012). Under normal watering, superoxide dismutase (SODB2) and chloroplastic superoxide dismutase [Fe] (SODB) were upregulated in roots. Under drought conditions, two transcripts for superoxide dismutase [Cu-Zn] (CSD2) were upregulated in leaves. In a comparison of drought and normal watering, the two transcripts for superoxide dismutase [Cu-Zn] were more upregulated by Strain B in leaves under drought than under normal watering. Under normal watering, superoxide dismutase (SODB2) and chloroplastic superoxide dismutase [Fe] (SODB) were downregulated in stems.

[0586] In plants, alcohol dehydrogenase, a highly conserved enzyme, is induced by stress conditions, particularly during hypoxic response, to anaerobically supply NAD+ for metabolism (Chung and Ferl, 1999). Under normal watering, alcohol dehydrogenase (ADH-2) was upregulated in stems.

[0587] Aldehyde dehydrogenases are members of the NAD(P)(+)-dependent protein superfamily involved in the conversion of various aldehydes to their corresponding nontoxic carboxylic acids (Brocker et al., 2013). Aldehyde dehydrogenases are involved in a wide range of metabolic pathways including growth, development, seed storage, and environmental stress adaptation in higher plants (Rodrigues et al., 2006; Brocker et al., 2013). Under drought conditions, aldehyde dehydrogenase was upregulated in leaves. In a comparison of drought and normal watering, the same aldehyde dehydrogenase transcript was more upregulated by Strain B in leaves under drought than under normal watering. Under normal watering, aldehyde dehydrogenase was downregulated in leaves.

[0588] The first committed step in biosynthesis of very-long-chain fatty acids (20 or more carbons) is condensation of C2 units to acyl CoA by 3-ketoacyl CoA synthase (KCS) (Gilbert et al., 1981). Very-long-chain fatty acid derivatives act as protective barriers between plants and the environment, provide energy storage in seeds, and function as signaling molecules in membranes (Devaiah et al., 2006; Pollard et al., 2008). The expression of two Arabidopsis 3-ketoacyl CoA synthase genes increased in response to drought stress, salt, mannitol and ABA (Lee et al., 2009). Indeed our results show that two 3-ketoacyl CoA synthase transcripts were upregulated under drought in leaves of Strain B-treated plants. Under drought conditions, 3-ketoacyl-CoA synthase was downregulated in stems.

[0589] Lipid signaling has been implicated in epidermal stages of rhizobium-host interaction in Medicago truncatula (Pii et al., 2012). Phospholipase D is required for MtN5 induction in S. meliloti-inoculated roots (Pii et al., 2012). Furthermore, phospholipase D and its product, phosphatidic acid, have been implicated in multiple plant stress responses by functioning in signal transduction cascades and influencing the biophysical state of lipid membranes (Bargmann and Munnik, 2006). In a comparison of drought and normal watering, phospholipase D was more upregulated by Strain B in roots under drought than under normal watering.

[0590] Annexins, a multigene and a multifunctional family of Ca2+-dependent membrane-binding proteins, have been shown to potentially regulate the level and the extent of ROS accumulation and lipid peroxidation during stress responses (Jami et al., 2008). Under drought conditions, two annexin transcripts were upregulated in leaves. In a comparison of drought and normal watering, these two transcripts and two additional annexin transcripts were more upregulated by Strain B in leaves under drought than under normal watering.

[0591] The plant glutathione peroxidases are ubiquitous enzymes (Yang et al., 2005) that detoxify lipid hydroperoxides and other reactive molecules in a species-, organ- and stress-specific manner (Churn et al., 1999; Ramos et al., 2009). Under drought conditions, two transcripts for glutathione peroxidase were upregulated in leaves.

[0592] The cytochrome P450 CYP77 family hydroxylates and epoxidizes fatty acids, a step in production of precursors of cutin and suberin, biopolyesters that provide protection for the aerial parts and roots, respectively (Kolattukudy, 1980; Sauveplane et al., 2009). Under drought conditions, cytochrome P450 77A3 (CYP77A3) was upregulated in leaves.

[0593] The cytochrome P450 CYP93 family is involved in elicitor-inducible glyceollin biosynthesis (Nelson and Werck-Reichhart, 2011; Schopfer and Ebel, 1998). Under normal watering, beta-amyrin 24-hydroxylase (CYP93E1) was upregulated in roots. In a comparison of drought and normal watering, Cytochrome P450 93A3 (CYP93A3) was more upregulated by Strain B in roots under drought than under normal watering.

[0594] Recent reverse genetics studies in Arabidopsis revealed that besides their iron storage role, ferritins may be involved in mechanisms of action in oxidative stress pathways (Briat et al., 2010). Six ferritin transcripts were notably upregulated in a tissue- and condition-specific manner. Under normal watering, one ferritin transcript was upregulated in stems and leaves. Under drought conditions, this transcript, another ferritin transcript, and transcripts for chloroplastic ferritins 1, 2, and 4 were all upregulated in stems. In a comparison of drought and normal watering, all five of these transcripts and one additional ferritin transcript (FER2-1) were more upregulated by Strain B in stems under drought than under normal watering.

[0595] Thioredoxins are implicated in different aspects of plant life including development and adaptation to environmental changes and stresses. They act as antioxidants by facilitating the reduction of other proteins by cysteine thiol-disulfide exchange (Nordberg and Arnér, 2001). Under normal watering, one thioredoxin transcript was upregulated in roots. Under drought conditions, a second thioredoxin transcript was upregulated in leaves, a third in stems, and a fourth in roots. In a comparison of drought and normal watering, these last two transcripts were more upregulated by Strain B in stems and leaves, respectively, under drought than under normal watering.

[0596] Phosphomannomutase is related to biosynthesis of ascorbic acid, an antioxidant important in responses to oxidative stress (Qian et al., 2007). Under drought conditions, phosphomannomutase was upregulated in leaves. In a comparison of drought and normal watering, this transcript was more upregulated by Strain B in leaves under drought than under normal watering.

[0597] The EF-hand structural domain provides calcium-binding activity for proteins involved in calcium-signaling for stress response and developmental regulation, including calmodulin and proteins from the salt overly sensitive (SOS) pathway and SOS-like calcium binding proteins (SCaBP) family (Lin et al., 2009). Under drought conditions, an unidentified calcium-binding EF-hand family protein was upregulated in leaves. In a comparison of drought and normal watering, this transcript was more upregulated by Strain B in stems and leaves under drought than under normal watering.

[0598] Calmodulins mediate calcium signaling, with widely varied roles across tissues, developmental stages, and stimulus responses (McCormack et al., 2005). In Arabidopsis, calmodulin-2 binds to heat shock protein 70 during calcium signaling, potentially mediating temperature stress responses (Cha et al., 2012). Under drought conditions, calmodulin-2 was upregulated in leaves. In a comparison of drought and normal watering, calmodulin-2 was more upregulated by Strain B in leaves under drought than under normal watering.

[0599] The ethylene-responsive element binding factors are stress-inducible transcription factors, participating in genetic regulation of various stress responses (Seki et al., 2002). Under drought conditions, ethylene-responsive element binding factor 4 (ERF-4) was upregulated in roots. In a comparison of drought and normal watering, this transcript was more upregulated by Strain B in roots under drought than under normal watering.

[0600] MYB proteins are transcription factors present across eukaryotes, involved in growth, metabolism, and stress responses in plants (Li et al., 2015). Under drought conditions, MYB transcription factor 187 (MYB187) was upregulated in leaves. In a comparison of drought and normal watering, this transcript was more upregulated by Strain B in leaves under drought than under normal watering.

[0601] Peptidyl prolyl cis-trans isomerases are molecular chaperones that participate in protein folding and signal transduction (Aviezer-Hagai et al., 2006). In Arabidopsis, the two peptidyl prolyl cis-trans isomerases ROF1 and ROF2 possess different tissue-specific, developmentally regulated, and heat-inducible expression patterns (Aviezer-Hagai et al., 2006). ROF2 has also been shown to participate in intracellular pH homeostasis in Arabidopsis (Bissoli et al., 2012). Under drought conditions, one peptidyl-prolyl cis-trans isomerase was upregulated in leaves. In a comparison of drought and normal watering, this transcript and three others were more upregulated by Strain B in leaves and three additional peptidyl-prolyl cis-trans isomerase transcripts were more upregulated by Strain B in stems under drought than under normal watering.

[0602] Nitrate reductase is the enzyme responsible for production of nitric oxide in leaves to induce stomatal closure, in response to ABA signaling under water stress (Desikan et al., 2002). Under drought conditions, nitrate reductase was downregulated in leaves.

[0603] Ribose-phosphate pyrophosphokinase produces phosphoribosyldiphosphate, a precursor in biosynthesis of nucleotides, histidine, and tryptophan (Schomburg and Stephan, 1997), as well as NAD and NADP (Zakataeva et al., 2011) and amino sugar synthesis (Rashid et al., 1997). Possibly via NAD's role in cell regulation (Rongvaux et al., 2003), ribose-phosphate pyrophosphokinase has been implicated in iron deficiency response in rice (Chen et al., 2014) and stomatal control in faba bean (Khazaei et al., 2014). Under drought conditions, a ribose-phosphate pyrophosphokinase was downregulated in leaves.

### Biotic Stresses

[0604] Lipases are involved in plant resistance to pathogens (Shah, 2005). Under drought conditions, two lipases were upregulated in roots. In a comparison of drought and normal watering, these lipases was more upregulated by Strain B in roots under drought than under normal watering. Under normal watering, two transcripts of lipase were downregulated in roots.

[0605] Lipoxygenases catalyze the dioxygenation of polyunsaturated fatty acids in oxylipins, a group of lipids that include j asmonic acid (JA) and its derivatives, and which are involved in a number of developmental and stress response processes (Andersson et al., 2006). Oxilipins may exert protective activities either as signaling molecules in plants during development, wounding, insect and pathogen attack, or as direct anti-microbial substances that are toxic to the invader (Yan et al., 2013). Seven lipoxygenase transcripts were notably upregulated in a tissue- and condition-specific manner. Under normal watering, LOX10 was upregulated in roots and two additional lipoxygenase transcripts were upregulated in leaves. Under drought conditions, LOX9 was upregulated in roots and one additional lipoxygenase transcript was upregulated in leaves. In a comparison of drought and normal watering, these latter two transcripts and two additional lipoxygenase transcripts in roots were more upregulated by Strain B in the previously mentioned tissues under drought than under normal watering. Under drought conditions, one transcript of lipoxygenase was downregulated in stems and another in leaves.

[0606] Non-specific lipid transfer proteins (ns-LTPs) are ubiquitous, small, secreted proteins, able to bind to several classes of lipids in vitro (Carvalho and Gomes, 2007). They have been implicated in cutin biosynthesis during pollen development (Zhang et al., 2010), and in stress responses and signaling (Ge et al., 2003). In addition, lipid signaling has recently been implicated in epidermal stages of rhizobium-host interaction: in Medicago truncatula, lipid transfer protein MtN5 positively regulates nodulation (Pii et al., 2012). Twelve non-specific lipid-transfer protein transcripts were notably upregulated in a tissue-specific manner in drought. Under drought conditions, one non-specific lipid-transfer protein was upregulated in roots, another in stems and leaves, and ten more in leaves. In a comparison of drought and normal watering, all of these transcripts were more upregulated by Strain B in the previously mentioned tissues under drought than under normal watering. Under normal watering, one transcript of non-specific lipid-transfer protein was downregulated in stems and leaves, and another only in leaves. Under drought conditions, a different transcript of non-specific lipid-transfer protein was downregulated in stems.

[0607] Stress-induced protein SAM22 has been implicated in mechanisms of biotic stress response, including wounding, salicylic acid signaling, hydrogen peroxide signaling, and fungal elicitor response (Crowell et al., 1992). Under normal watering, stress-induced protein SAM22 (DD4/62) was upregulated in roots and leaves. Under drought conditions, the same transcript was upregulated in leaves. Under normal watering, stress-induced protein SAM22 was downregulated in stems.

[0608] Repetitive proline-rich cell wall proteins (PRPs), one of the five families of structural cell wall proteins (Carpita and Gibeaut, 1993) that are associated with early stages of legume root nodule formation (Franssen et al., 1987) and other plant developmental stages, may also contribute to defense response mechanisms against physical damage and pathogen infection (Bradley et al., 1992; Brisson et al., 1994). Under normal watering, repetitive proline-rich cell wall protein 2 (PRP2) was upregulated in roots, and PRP3 was upregulated in leaves. Under drought conditions, PRP3 was upregulated in roots. In a comparison of drought and normal watering, PRP3 was more upregulated by Strain B in roots under drought than under normal watering. Under drought conditions, repetitive proline-rich cell wall protein 2 was downregulated in leaves.

[0609] The cytochrome P450 CYP89 family has highly variable metabolic functions, leading to involvement in developmental regulation and plant-insect interactions (Christ et al., 2013). For example, CYP89A9 is involved in chlorophyll catabolism during senescence in Arabidopsis (Christ et al., 2013), CYP89H3 specifically is involved in ripening in grapes (Agudelo-Romero et al., 2013), and CYP89A35 is involved in pathogen response via SA and ABA in chili pepper (Kim et al., 2006; Nelson and Werck-Reichhart, 2011). Under normal watering, cytochrome P450 monooxygenase 89H3 (CYP89H3) was upregulated in stems. Under normal watering, cytochrome P450 82A4 was downregulated in roots.

[0610] Beta-glucosidase is a cellulase that catalyzes the hydrolysis of terminal non-reducing residues in beta-D-glucosides with release of glucose (Jeng et al., 2011). Beta-glucosidases have been shown to have an elicitor activity of plant defense response to herbivore injury (Mattiacci et al., 1995) or, more specifically, in soybean, they mediate the release of free isoflavones from their conjugates (Suzuki et al., 2006). Flavonoids and isoflavonoids are secondary metabolites that have many functions in higher plants that include UV protection, fertility, antifungal defense and the recruitment of nitrogen-fixing bacteria (Dao et al., 2011). In a comparison of drought and normal watering, beta glucosidase 42 (BGLU42) was more upregulated by Strain B in leaves under drought than under normal watering.

[0611] Soybean beta-1,3-endoglucanase releases elicitor-active carbohydrates from the cell walls of fungal pathogens, initiating phytoalexin accumulation in fungus-infected soybean plants (Takeuchi et al., 1990). Beta-1,3-endoglucanase is synonymouswith glucan endo-1,3-beta-glucosidase (Reference: http://www.uniprot.org/uniprot/P34742 see Names & Taxonomy, herein incorporated by reference). Under normal watering, glucan endo-1,3-beta-glucosidase, synonymous according to the UniProt protein database (UniProt Consortium, 2015a), was upregulated in leaves.

[0612] MLO-like proteins are transmembrane proteins known to bind to calmodulin and to participate in biotic stress responses (Elliott et al., 2005; Yu et al., 2005). Six MLO-like protein transcripts were notably upregulated in a tissue- and condition-specific manner. Under normal watering, one MLO-like protein was upregulated in roots. Under drought conditions, a second MLO-like protein was upregulated in leaves. In a comparison of drought and normal watering, four additional MLO-like proteins were more upregulated by Strain B in roots under drought than under normal watering.

[0613] Wound-induced proteins are those that are upregulated locally by mechanical wounding, which may include proteins active in cell wall modification, defense signaling, or other biotic stress responses (Siebertz et al., 1989; Yen et al., 2001). Under normal watering, a wound-induced protein was upregulated in leaves.

[0614] Phenylalanine ammonia lyase (PAL) is the first committed enzyme in the phenylpropanoid pathway leading to biosynthesis of the polyphenol compounds, whose multiple functions include providing mechanical support via lignification (Whetten and Sederoff, 1992), protecting against abiotic and biotic stress as antioxidants (Dixon and Paiva, 1995), and signaling with the flavonoid nodulation factors (Weisshaar and Jenkins, 1998). Under drought conditions, phenylalanine ammonia-lyase was upregulated in the stems.

[0615] Arginine decarboxylase is a key enzyme in plant polyamine biosynthesis (Hanfrey et al., 2001). Polyamines have been implicated in a wide range of biological processes including plant growth and development, senescence, environmental stress, and anti-fungal and antiviral effects in pathogen responses (Bais and Ravishankar, 2002). In a comparison of drought and normal watering, arginine decarboxylase was more upregulated by Strain B in stems under drought than under normal watering.

[0616] Arginase breaks down arginine, a major free and storage-protein-bound amino acid, to urea and ornithine (Polacco and Holland, 1993). Expression of arginase has been shown to be inducible in tomato leaves in response to various stresses including wounding and pathogen infection (Chen et al., 2004). Arginase was upregulated in leaves of Strain B-treated plants exposed to drought.

[0617] In soy, the glycoproteins VSPα and VSβ are vegetative storage proteins important in hypocotyls, young leaves, flowers, and pods, inducible by JA signaling, wounding, sugars, and light, and downregulated by phosphate and auxin (Berger et al., 1995). Under normal watering, VspA (28 kDa glycoprotein) and VspB (31 kDa glycoprotein) were downregulated in roots, and VspB was downregulated in stems and leaves.

[0618] S-receptor-like serine/threonine protein kinase, characterized in Glycine soj a, has been shown to play a key role as a positive regulator of plant tolerance to salt stress (Sun et al., 2013). Under normal watering, serine/threonine-protein kinase was downregulated in leaves.

[0619] Soy protein P21 (P25096) is a pathogenesis-related (PR) protein of the thaumatin family, involved in antifungal activity (UniProt Consortium, 2015b; Zhang and Shih, 2007). Under normal watering, protein P21 was downregulated in roots and leaves.

### Results: Transcriptomics Quantitative Analysis (Soy Water-Limited Conditions)

[0620] Quantitative transcriptomics analyses demonstrated significant conclusions in five areas, as described below.

Genes were Quantified as being Significantly Up/Down Regulated Plants Grown from Strain A or Strain B, Vs Formulation, that Confirm the Qualitative Analysis (Leaf and Root Tissues)

[0621] All results are summarized in Table 7B. Descriptions of genes are included in the Qualitative Transcriptomics results section.

Additional Genes that were Quantified as being Significantly Up/Down Regulated in Leaf or Root Tissues of Plants Grown from Seeds Treated with Strain a or Strain B

[0622] All results are summarized in Table 7C.

[0623] Avr4 promotes Cf-4 receptor-like protein association with the BAK1/SERK3 receptor-like kinase to initiate receptor endocytosis and plant immunity (Liebrand et al. 2014)

[0624] Receptor-like proteins (RLPs) are cell surface receptors involved in perceiving and responding to microbes, including HR and immunity (Liebrand et al. 2014). They often have a leucine-rich repeats domain (LRR)—possibly the same protein as “disease resistance family protein/LRR family protein.

[0625] Sodium/calcium exchanger family protein/calcium-binding EF hand family protein participates in the maintenance of Ca2+ homeostasis in Arabidopsis and may represent a new type of Ca2+ transporter in higher plants shown to be involved in salt stress in Arabidopis (Peng et al., 2012).

[0626] The AMP-dependent synthetase and ligase family protein is an enzyme involved in carbon metabolism, and has a role in degrading acetone to acetyl-CoA in an anaerobic microbe that uses nitrate as an electron acceptor.

[0627] Cysteine proteinases superfamily protein participate in developmental regulation, including accumulation and degradation of storage proteins, senescence, and programmed cell death (Schaller, 2004).

[0628] Uridine diphosphate glycosyltransferases (UGT) are a superfamily of regulatory enzymes that modify the activity, solubility, and transport of plant hormones, secondary metabolites, and xenobiotics, thus participating in plant developmental regulation, biotic stress responses, and detoxification of pollutants and herbicides (Ross et al., 2001; Wang 2009). Transgenic wheat expressing a barley UDP-glucosyltransferase detoxifies deoxynivalenol and provides high levels of resistance to Fusarium graminearum. A UDP-glucosyltransferase functions in both acylphloroglucinol glucoside and anthocyanin biosynthesis in strawberry (Fragaria×ananassa). UDP-glucosyltransferase UGT84A2/BRT1 is required for Arabidopsis nonhost resistance to the Asian soybean rust pathogen Phakopsora pachyrhizi. Transgenic Arabidopsis thaliana expressing a barley UDP-glucosyltransferase exhibit resistance to the mycotoxin deoxynivalenol. Indole-3-acetic acid UDP-glucosyltransferase from immature seeds of pea is involved in modification of glycoproteins.

[0629] The phosphoglycerate mutase (PGM) enzyme catalyzes the interconversion of 2- and 3-phosphoglycerate in the glycolytic/gluconeogenic pathways that are present in the majority of cellular organisms.

[0630] 2-oxoglutarate (20G) and Fe(II)-dependent oxygenase superfamily protein catalyzes prolyl hydroxylation of RPS23 and is involved in translation control and stress granule formation (Singleton et al. 2014). The OGFOD proteins appear to participate in normal translation processes and gene regulation during translation, with some of these proteins modifying mRNA and tRNA.

[0631] Protein kinase protein with adenine nucleotide alpha hydrolases-like domain is involved in protein amino acid phosphorylation and response to stress (Mayer et al., 1999).

[0632] Cysteine proteases and proteinases participate in developmental regulation, including accumulation and degradation of storage proteins, senescence, and programmed cell death (Schaller, 2004).

[0633] Ferric reduction oxidase 2 facilitates iron nutrient uptake.

[0634] Expansin acts during growth to loosen the cell wall polysaccharide network (Cosgrove, 2000), permitting growth but increasing vulnerability to pathogen infection (Ding et al., 2008).

[0635] In plants, peroxidases are involved in cell wall lignification, usually associated with pathogen resistance (Bruce and West, 1989), abiotic stress (Huttová et al., 2006; Quiroga et al., 2001), or cell wall modification during growth (Arnaldos et al., 2002; G Martinez Pastur, 2001; Van Hoof and Gaspar, 1976; Kukavica et al., 2012).

[0636] Late embryogenesis abundant proteins (LEA) provide desiccation tolerance by changing their folding during drying, possibly creating a water shell under drought and stabilizing cellular components in the absence of water under full desiccation (Shih et al., 2008). The LEA gene HVA1 was successfully transferred from barley into rice to provide water deficit and salt stress tolerance (Xu et al., 1996).

[0637] Fructose-bisphosphate aldolase is a glycolytic enzyme, induced by the plant hormone gibberellin, that may regulate the vacuolar H-ATPase-mediated control of cell elongation that determines root length (Konishi et al., 2005).

[0638] Pectin lyases are a group of enzymes that are thought to contribute to many biological processes, such as the degradation of pectin. A comprehensive study done in Arabidopsis identified multiple genes involved in cellular metabolism, cellular transport and localization, and stimulus responses like wounding (Cao J., 2012)

[0639] Pectinesterase is an enzyme involved in cell wall modification during growth, biotic stress, and nodule formation (Caffall and Mohnen, 2009; Carvalho et al., 2013; Zhang et al., 2015).

[0640] NAC (No Apical Meristem) domain transcriptional regulator superfamily protein:

[0641] RhNAC3, a stress-associated NAC transcription factor, has a role in dehydration tolerance through regulating osmotic stress-related genes in rose petals. NAC domain protein genes are homologous to well-known Arabidopsis transcription factors that regulate the differentiation of xylem vessels and fiber cells (Ooka et al., 2003).

[0642] Cytochrome P450, family 81, subfamily D, polypeptide 3 is involved in secondary metabolite production.

[0643] CAP160 protein is a stress-related transporter, and may function in daytime soybean transcriptome fluctuations during water deficit stress

[0644] RhNAC3, a stress-associated NAC transcription factor, has a role in dehydration tolerance through regulating osmotic stress-related genes in rose petals

[0645] SAUR genes are induced rapidly and transiently by auxin, localized to the membrane and cytoplasm, and related to developmental processes, especially tissue elongation.

[0646] The tetratricopeptide repeat is a conserved motif that supports protein-protein interactions, most often found in multiprotein complexes and involved in a variety of essential functions (Blatch and Lassie, 1999). Proteins containing tetratricopeptide repeats have been associated with chloroplast development (Hu et al., 2014), root growth and auxin signaling (Zhang et al., 2015), gibberellin signaling (Jacobsen et al., 1996), heat shock protein function in abiotic stress responses (Prodromou et al., 1999).

[0647] Bifunctional inhibitor/lipid-transfer protein/seed storage 2S albumin superfamily protein is involved in seed quality—storing protein and/or lipid.

[0648] Ber e 1 protein is the versatile major allergen from Brazil nut seeds (Alcocer et al. 2012).

[0649] 2S albumin proteins are the proteins that get stored in seeds.

[0650] The Arabidopsis NIMIN proteins affect NPR1 differentially (Hermann et al. 2013). NPR receives SA and triggers the PR genes to initiate SAR. NIM-interacting proteins (NIMIN) and TGA transcription factors are part of the transcription complex that carries out NPR's mechanism.

[0651] BR hormones promote growth in balance/crosstalk with immune response. BRI1 is the receptor, “reading” brassinosteroids. “Brassinosteroids (BRs) are a group of phytohormones that regulate various biological processes in plants. Interactions and crosstalk between BRs and other plant hormones control a broad spectrum of physiological and developmental processes.”

[0652] WRKY transcription factors are involved in biotic and abiotic stress responses and development.

[0653] Amino acid kinase family protein regulates nitrogen metabolism. An example, aspartate kinase, receives feedback control and catalyzes the first step: adding a phosphate group to an amino acid (here, aspartate).

[0654] VIP1 is a transcription factor that transclocates to the nucleus in response to mechanical touch and hypo-osmotic conditions, which mimic mechanical stimuli. VIP1 appears to suppress touch-induced responses (Tsugama et al. 2016). VIP was first studied in relation to Agrobacterium, which apparently uses VIP1's movement into the nucleus to “hitch a ride” and transfer its own DNA into the plant cell's nucleus (Gelvin 2010).

[0655] Glycosyl hydrolases family 32 protein is the key enzyme in decomposing lignocellulose/plant cell walls (Kanokratana et al. 2015, Mori et al. 2014). Likely used by plants to remodel cell walls during stress, and possibly in relation to microbial colonization.

[0656] The RWP-RK family are transcription factors that regulate responses to nitrogen availability, including nodule formation and rhizobial colonization. They were first found in legumes, but homologs exist in all vascular plants, green algae, and slime molds.

[0657] Late embryogenesis abundant proteins (LEA) provide desiccation tolerance by changing their folding during drying, possibly creating a water shell under drought and stabilizing cellular components in the absence of water under full desiccation (Shih et al., 2008). The LEA gene HVA1 was successfully transferred from barley into rice to provide water deficit and salt stress tolerance (Xu et al., 1996).

[0658] CYP71 family previously identified in up/down regulation during stress responses to drought, phenol (Cerekovic et al. 2015, Xu et al. 2012). Suggests a close relative enzyme (CYP71A22 (cytochrome P450, family 71, subfamily A, polypeptide 22) participates in the pathway to synthesize furanocoumarins, defensive secondary metabolites, in grapefruit (Chen et al. 2014).

[0659] The heat-shock proteins are molecular chaperones expressed under various stresses to stabilize proteins (De Maio, 1999).

Up/Down Regulated Genes that are Unique to Plants Grown from Seeds Treated with Strain A or Strain B (Genes in Leaf or Root Tissues) as Compared to Plants Grown from Seeds Treated with the Formulation Control, that are not Found Significantly Up- or Down-Regulated in Plants Grown from Seeds Treated with Strain F

[0660] All results are summarized in Table 7D.

[0661] Lectin receptor kinases are signaling molecules involved in a wide range of plant activities, including nodulation and symbiosis in legumes, detection and response to herbivory and pathogens, abiotic stress tolerance, and certain aspects of plant development (Vaid et al., 2012).

[0662] In plants, the FW2.2-like (FWL) genes containing the PLAC8 conserved motif determine cell count in vegetative and reproductive structures, contributing directly to yield (Guo et al., 2010). Fruit size in tomato (Nesbitt and Tanksley, 2001), plant and organ size in corn (Guo et al., 2010), and organogenesis in corn and soybean (Libault and Stacey, 2010) have been attributed to FWL genes.

[0663] Glycerol acyltransferases are a group of enzymes involved in synthesizing triacylglycerol, which accumulates in the seed, permitting normal seed embryo development (Zhang et al., 2009) and providing the main component of soybean oil (Wang et al., 2006).

[0664] The ribosome is essential for translation of mRNA into proteins in all living organisms. In eukaryotes, the ribosome is composed of a large 60S subunit and a small 40S subunit (Ben-Shem et al., 2011).

[0665] Embryo defective 2737 (Emb2737) is a putative membrane protein, essential to embryonic development (Simm et al., 2013).

[0666] In plants the Armadillo (ARM) repeat region, which is a motif involved in protein-protein interactions, is preceded by a E3 ubiquitin ligase motif called the U-box and thus can result in proteasomal degradation or, alternately, regulate other processes such as transcription and DNA repair (Samuel et al. 2006). In Arabidopsis, an Arm Repeat protein interacts with a transcriptional regulation of Abscisic Acid-Responsive genes, making plants sensitive to high osmolarity during germination and insensitive to salt during subsequent seedling growth (Kim et al. 2004)

[0667] Pleiotropic drug resistance 1 is a plasma membrane ABC transporter involved in tolerance against accumulation of the deoxynivalenol (DON), one of the toxins produced by Fusarium pathogens during spike invasion as first step in the progression of the head blight disease in wheat (Gottwald et al. 2012).

[0668] The enzyme encoded by histidinol phosphate aminotransferase 1 gene catalyzes the synthesis of 3-(imidazol-4-yl)-2-oxopropyl phosphate and is involved in histidine metabolism. This is a gene associated with symbiotic nitrogen fixation in soybean, upregulated under drought conditions (Dhanapal et al. 2015)

[0669] The tetratricopeptide repeat is a conserved motif that supports protein-protein interactions, most often found in multiprotein complexes and involved in a variety of essential functions (Blatch and Lassie, 1999). Proteins containing tetratricopeptide repeats have been associated with chloroplast development (Hu et al., 2014), root growth and auxin signaling (Zhang et al., 2015), gibberellin signaling (Jacobsen et al., 1996), heat shock protein function in abiotic stress responses (Prodromou et al., 1999).

[0670] AGC kinases are regulatory proteins involved in many key functions and pathways, including growth and development and biotic stress responses (Garcia et al., 2012).

[0671] K+ uptake permeases (KUP) are K+/H+ symporters embedded in the plasma membrane, responsible for transporting the essential nutrient potassium. Upregulation of a KUP gene was detected in a low-potassium-tolerant variety of soybean, suggesting a mechanism for tolerance (Wang et al., 2012).

[0672] Phloem protein 2-A1 in Arabidopsis was found to act as a molecular chaperone and provide antifungal activity (Lee et al., 2014). In citrus, the phloem protein 2 family is associated with phloem plugging in response to bacterial and viral infections (Albrigo et al., 2014; Hajeri et al., 2014).

[0673] The development and cell death (DCD) domain regulates programmed cell death via the hypersensitive response in plants, and is shared by numerous plant proteins involved in hormone response, embryo development, and hypersensitive response to pathogens and abiotic stress (Tenhaken et al., 2005).

[0674] Abiotic stresses and pathogen attack can result in accumulated DNA damage and eventual genotoxic stress, necessitating coordination of DNA repair in response to environmental stress (Dona et al., 2013). The RAD family proteins are dedicated to DNA repair, with numerous homologs in plants (Heitzeberg et al., 2004; Liu et al., 2000).

[0675] LMBR-like proteins are integral membrane proteins involved in developmental regulation, with homologs across eukaryote taxa (Kelsey et al., 2012).

[0676] Lectin receptor kinases are signaling molecules involved in a wide range of plant activities, including nodulation and symbiosis in legumes, detection and response to herbivory and pathogens, abiotic stress tolerance, and certain aspects of plant development (Vaid et al., 2012).

[0677] Helicases are involved in basic cellular functions, including DNA replication and repair, RNA splicing, translation, and the cell cycle (Isono et al., 1999).

[0678] Increases in organic acid metabolism support a shift in carbon metabolism that accommodates increased nitrate assimilation (Scheible et al., 2000). Phosphoenolpyruvate carboxylase is a metabolic enzyme involved in organic acid metabolism, regulated by its related kinase (Scheible et al., 2000).

[0679] Amino acid permeases transport nitrogen across cell membranes in the form of amino acids, contributing to the dynamics of nitrogen fixation and assimilation, and regulating growth and development (Tegeder, 2012). For example, in Arabidopsis, seed count and normal seed development depend absolutely on the amino acid permease AAP8 (Schmidt et al. 2007).

[0680] Transcription factors are proteins that bind to specific sequences of DNA, usually as part of a multi-protein complex, in order to regulate which genes are expressed (Tripathi et al., 2013). Transcription factors also participate in DNA repair processes (Malewicz and Perlmann, 2014).

[0681] TRF-like genes are a subgroup of the MYB transcription factors (Du et al., 2013), involved in growth, metabolism, and stress responses in plants (Li et al., 2015). In maize, TRF-like genes were found to be more highly expressed under drought stress and in seeds (Du et al., 2013).

Up/Down Regulated Genes that are Significantly Represented in Plants Grown from Seeds Treated with Strain a or Strain B Versus Plants Grown from Seeds Treated with Strain F

[0682] All results are summarized in Table 7E.

[0683] Receptor-like proteins (RLPs) are cell surface receptors involved in perceiving and responding to microbes, including HR and immunity (Liebrand et al. 2014). They often have a leucine-rich repeats domain (LRR)—possibly the same protein as “disease resistance family protein/LRR family protein.

[0684] The tetratricopeptide repeat is a conserved motif that supports protein-protein interactions, most often found in multiprotein complexes and involved in a variety of essential functions (Blatch and Lassie, 1999). Proteins containing tetratricopeptide repeats have been associated with chloroplast development (Hu et al., 2014), root growth and auxin signaling (Zhang et al., 2015), gibberellin signaling (Jacobsen et al., 1996), heat shock protein function in abiotic stress responses (Prodromou et al., 1999).

[0685] AMP-dependent synthetase and ligase family protein is an enzyme involved in carbon metabolism. The link below describes this enzyme's role in degrading acetone to acetyl-CoA in an anaerobic microbe that uses nitrate as an electron acceptor. In the proposed acetone degradation pathway, an acetone carboxylase converts acetone to acetoacetate, an AMP-dependent synthetase/ligase converts acetoacetate to acetoacetyl-CoA, and an acetyl-CoA acetyltransferase cleaves acetoacetyl-CoA to two acetyl-CoA (Oosterkamp et al. 2015).

[0686] VIP1 is a transcription factor that transclocates to the nucleus in response to mechanical touch and hypo-osmotic conditions, which mimic mechanical stimuli. VIP1 appears to suppress touch-induced responses (Tsugama et al. 2016). VIP was first studied in relation to Agrobacterium, which apparently uses VIP1's movement into the nucleus to “hitch a ride” and transfer its own DNA into the plant cell's nucleus (Gelvin 2010).

[0687] The RWP-RK family are transcription factors that regulate responses to nitrogen availability, including nodule formation and rhizobial colonization. They were first found in legumes, but homologs exist in all vascular plants, green algae, and slime molds.

[0688] UTP-glucose-1-phosphate uridylyltransferase provides UDP-glucose, an important substrate for cell wall polysaccharide biosynthesis (Cook et al., 2012; Hertzberg et al., 2001).

[0689] UDP-glucose 6-dehydrogenase is an enzyme that participates in cell wall formation and modification by providing UDP-glucuronate for polysaccharide biosynthesis (Cook et al., 2012).

[0690] CYP71 family previously identified in up/down regulation during stress responses to drought, phenol (Cerekovic et al. 2015, Xu et al. 2012). Suggests a close relative enzyme (CYP71A22 (cytochrome P450, family 71, subfamily A, polypeptide 22) participates in the pathway to synthesize furanocoumarins, defensive secondary metabolites, in grapefruit (Chen et al. 2014).

[0691] Glycosyl hydrolases family 32 protein is a key enzyme in decomposing lignocellulose/plant cell walls (Kanokratana et al. 2015, Mori et al. 2014). Likely used by plants to remodel cell walls during stress, and possibly in relation to microbial colonization.

[0692] The tetratricopeptide repeat is a conserved motif that supports protein-protein interactions, most often found in multiprotein complexes and involved in a variety of essential functions (Blatch and Lassie, 1999). Proteins containing tetratricopeptide repeats have been associated with chloroplast development (Hu et al., 2014), root growth and auxin signaling (Zhang et al., 2015), gibberellin signaling (Jacobsen et al., 1996), heat shock protein function in abiotic stress responses (Prodromou et al., 1999).

[0693] Leucine-rich repeat receptor kinases (LRR-RKs) perform cell surface signaling to register environmental information, including microbe recognition (Belkhadir et al. 2014).

[0694] The Snf1-related protein kinases SnRK2. 4 and SnRK2. 10 are involved in maintenance of root system architecture during salt stress (McLoughlin et al. 2012)

[0695] A family of kinases involved in osmotic stress signaling, possibly related to abscisic acid signaling.

[0696] WRKY DNA-binding protein 40 is a family of transcription factors involved in biotic and abiotic stress responses and development.

[0697] SAUR genes are induced rapidly and transiently by auxin, localized to the membrane and cytoplasm, and related to developmental processes, especially tissue elongation.

[0698] The OGFOD proteins participate in normal translation processes and gene regulation during translation, with some of these proteins modifying mRNA and tRNA.

[0699] UDP-glucosyl transferase 88A1 can be applied in transgenic crops for pathogen resistance; produces glucosides and detoxifies microbial products. Uridine diphosphate glycosyltransferases (UGT) are a superfamily of regulatory enzymes that modify the activity, solubility, and transport of plant hormones, secondary metabolites, and xenobiotics, thus participating in plant developmental regulation, biotic stress responses, and detoxification of pollutants and herbicides (Ross et al., 2001; Wang 2009).

[0700] Cysteine proteases and proteinases participate in developmental regulation, including accumulation and degradation of storage proteins, senescence, and programmed cell death (Schaller, 2004).

[0701] CAP160 protein gene has been found up/down regulated before in drought stress in soy, as well as dehydration tolerance in roses and dessication tolerance in germinated Arabidopsis seeds. It is a stress-related transporter.

[0702] NmrA-like negative transcriptional regulator family protein performs as a nitrogen metabolite repressor, meaning ignoring a non-preferred nitrogen source because a preferred source is available. The superfamily includes the short-chain dehydrogenase/reductases (SDR), involved in metabolism and sometimes signaling, but NmrA is unlikely to act as a dehydrogenase. It is associated with a beneficial response to nanoparticle stress in soy (aluminum oxide nanoparticle treatment in flooded 2-day-old soy seedlings; 5-fold upregulation of this protein/transcript associated with enhanced growth).

[0703] The tetratricopeptide repeat is a conserved motif that supports protein-protein interactions, most often found in multiprotein complexes and involved in a variety of essential functions (Blatch and Lassie, 1999). Proteins containing tetratricopeptide repeats have been associated with chloroplast development (Hu et al., 2014), root growth and auxin signaling (Zhang et al., 2015), gibberellin signaling (Jacobsen et al., 1996), heat shock protein function in abiotic stress responses (Prodromou et al., 1999).

Up/Down Regulated Transcripts that are Significantly Represented in Plants Grown from Seeds Treated with Strain a or Strain B Vs. Plants Grown from Seeds Treated with Strain F

[0704] All results are summarized in Table 7F.

[0705] In plants the Armadillo (ARM) repeat region, which is a motif involved in protein-protein interactions, is preceded by a E3 ubiquitin ligase motif called the U-box and thus can result in proteasomal degradation or, alternately, regulate other processes such as transcription and DNA repair (Samuel et al. 2006). In Arabidopsis, an Arm Repeat protein interacts with a transcriptional regulation of Abscisic Acid-Responsive genes, making plants sensitive to high osmolarity during germination and insensitive to salt during subsequent seedling growth (Kim et al. 2004)

[0706] The bHLH family includes the MYC family transcription factors, involved in jasmonic acid defense signaling, and also the growth-promoting brassinosteroids.

[0707] Some members of the calcineurin-like metallo-phosphoesterase superfamily protein control the seed coat in soy (Sun et al., 2015).

[0708] WD40 domains allow proteins to bind with other proteins to form scaffolding and complexes, or to mediate other proteins' interactions. They are important in development and stress signaling.

[0709] NOT2_3_5 domain-containing proteins are involved in generating miRNA for post-transcriptional regulation of gene expression. Also includes Vire2-Interacting Protein2, above, involved in touch and hypo-osmotic signaling.

[0710] The development and cell death (DCD) domain regulates programmed cell death via the hypersensitive response in plants, and is shared by numerous plant proteins involved in hormone response, embryo development, and hypersensitive response to pathogens and abiotic stress (Tenhaken et al., 2005).

[0711] Abiotic stresses and pathogen attack can result in accumulated DNA damage and eventual genotoxic stress, necessitating coordination of DNA repair in response to environmental stress (Dona et al., 2013). The RAD family proteins are dedicated to DNA repair, with numerous homologs in plants (Heitzeberg et al., 2004; Liu et al., 2000).

[0712] LMBR-like proteins are integral membrane proteins involved in developmental regulation, with homologs across eukaryote taxa (Kelsey et al., 2012).

[0713] G protein alpha subunit 1 is involved in signal transduction—from cell surface receptors to transcription factors or other effector proteins.

[0714] the adaptor protein Yae1 binds to Rli1 and then recruits it to the CIA machinery via interactions that it makes with the deca-GX 3 motif on Lto1

[0715] P-loop containing nucleoside triphosphate hydrolases superfamily protein is a very large family, whose function is to interact with the triphosphate tail of bound nucleotides. Involved in just about everything: transcription, translation, replication, DNA repair, signaling, protein transport, chromosome structure, membrane transport, metabolism.

[0716] CAP160 protein is a stress-related protein.

[0717] MLO-like proteins are transmembrane proteins known to bind to calmodulin and to participate in biotic stress responses (Elliott et al., 2005; Yu et al., 2005).

[0718] One of the detoxification enzymes, superoxide dismutase (SOD), catalyses the dismutation of superoxide (O2-) to hydrogen peroxide (H202) that gets reduced to water by peroxidases (PDX) (Matamoros et al., 2003). SOD is specifically highly upregulated in plants grown under drought that show higher expression of nodulation genes. This is consistent with the literature showing that SOD plays a major role in maintaining nodule integrity via controlling ROS overproduction (Chihaoui et al., 2012).

[0719] XB3 ortholog 1 is involved with Hhypersensitive response (HR) signaling. A ubiquitin ligase, it binds to XA21, which is a receptor kinase that erforms microbial recognition. In rice, downregulating XB3 reduces the plant's ability to resist disease.

### Example 9: Identification of Differentially Regulated Proteins (Proteomics)

### Sample Preparation for Proteomics Analysis

[0720] 1 mL of 5% SDS 1 mM DTT was added to 1 mL of homogenized tissue and the samples were boiled for 5 m. The samples were cooled on ice and 2 mL of 8M urea solution was added. The samples were spun for 20 m at 14,000 rpm and the soluble phase recovered. A 25% volume of 100% TCA solution was added to the soluble phase, left on ice for 20 m and centrifuged for 10 m at 14,000 rpm. The protein pellet was washed twice with ice-cold acetone and solubilized in 125 uL 0.2M NaOH and neutralized with 125 uL of 1M Tris-Cl pH 8.0. Protein solutions were diluted in THE (50 mM Tris-Cl pH 8.0, 100 mM NaCl, 1 mM EDTA) buffer. RapiGest SF reagent (Waters Corp., Milford, Mass.) was added to the mix to a final concentration of 0.1% and samples were boiled for 5 min. TCEP (Tris (2-carboxyethyl) phosphine) was added to 1 mM (final concentration) and the samples were incubated at 37° C. for 30 min. Subsequently, the samples were carboxymethylated with 0.5 mg/ml of iodoacetamide for 30 min at 37° C. followed by neutralization with 2 mM TCEP (final concentration). Proteins samples prepared as above were digested with trypsin (trypsin:protein ratio—1:50) overnight at 37° C. RapiGest was degraded and removed by treating the samples with 250 mM HCl at 37° C. for 1h followed by centrifugation at 14,000 rpm for 30 min at 4° C. The soluble fraction was then added to a new tube and the peptides were extracted and desalted using Aspire RP30 desalting columns (Thermo Scientific). The trypsinized samples were labeled with isobaric tags (iTRAQ, ABSCIEX, Ross et al 2004), where each sample was labeled with a specific tag to its peptides.

### Mass Spectrometry Analysis

[0721] Each set of experiments (samples 1-6; 7, 8; 9-12; 13-16; 17-20) was then pooled and fractionated using high pH reverse phase chromatography (HPRP-Xterra C18 reverse phase, 4.6 mm×10 mm 5 um particle (Waters)). The chromatography conditions were as follows: the column was heated to 37° C. and a linear gradient from 5-35% B (Buffer A-20 mM ammonium formate pH10 aqueous, Buffer B-20 mM ammonium formate pH10 in 80% ACN-water) was applied for 80 min at 0.5 ml/min flow rate. A total of 30 fractions of 0.5 ml volume where collected for LC-MS/MS analysis. Each of these fractions was analyzed by high-pressure liquid chromatography (HPLC) coupled with tandem mass spectroscopy (LC-MS/MS) using nano-spray ionization. The nanospray ionization experiments were performed using a TripleT of 5600 hybrid mass spectrometer (AB SCIEX Concord, Ontario, Canada)) interfaced with nano-scale reversed-phase HPLC (Tempo, Applied Biosystems (Life Technologies), CA, USA) using a 10 cm-180 micron ID glass capillary packed with 5 um C18 Zorbax™ beads (Agilent Technologies, Santa Clara, Calif.). Peptides were eluted from the C18 column into the mass spectrometer using a linear gradient (5-30%) of ACN (Acetonitrile) at a flow rate of 550 μl min-1 for 100 min. The buffers used to create the ACN gradient were: Buffer A (98% H2O, 2% ACN, 0.2% formic acid, and 0.005% TFA) and Buffer B (100% ACN, 0.2% formic acid, and 0.005% TFA). MS/MS data were acquired in a data-dependent manner in which the MS1 data was acquired for 250 ms at m/z of 400 to 1250 Da and the MS/MS data was acquired from m/z of 50 to 2,000 Da. For Independent data acquisition (IDA) parameters MS1-TOF 250 ms, followed by 50 MS2 events of 25 ms each. The IDA criteria, over 200 counts threshold, charge state +2-4 with 4 s exclusion. Finally, the collected data were analyzed using Protein Pilot 4.0 (AB SCIEX) for peptide identifications and quantification.

### Results

[0722] The proteomic analysis of soybean plants inoculated with endophytic fungal strain Strain B grown under drought and normal watering regime in the greenhouse revealed three major pathways that are modulated by the endophyte: symbiosis enhancement, growth promotion and resistance against abiotic and biotic stresses. All results are summarized in Table 8.

[0723] Proteomics upregulated, normal watering conditions, in root tissue: cysteine proteinase RD21a-like, isocitrate dehydrogenase [NADP], bifunctional aspartate aminotransferase and glutamate/aspartate-prephenate aminotransferase-like, proteasome subunit alpha type-5-like, THO complex subunit 4-like isoform X1, asparagine synthetase, root [glutamine-hydrolyzing]-like, mitochondrial dicarboxylate/tricarboxylate transporter DTC-like, DNA repair and recombination protein RAD26-like, peptidyl-prolyl cis-trans isomerase CYP20-2, chloroplastic-like isoform 1, photosystem I P700 apoprotein A2, histone H4-like, 1-deoxy-D-xylulose 5-phosphate reductoisomerase, chloroplastic-like, thylakoid lumenal 16.5 kDa protein, chloroplastic-like isoform X1, beta-amylase precursor, cytochrome b6-f complex iron-sulfur subunit, chloroplastic-like, thioredoxin M4, chloroplastic-like.

[0724] Proteins downregulated, normal watering conditions, in root tissue: magnesium-chelatase subunit ChlI, chloroplastic, endoplasmin homolog isoform X2, chloroplast stem-loop binding protein of 41 kDa b, chloroplastic-like isoform X2, leucine aminopeptidase 3, chloroplastic-like, peroxisomal (S)-2-hydroxy-acid oxidase GLO1-like isoform X1, glutamate—glyoxylate aminotransferase 2-like isoform 2, alcohol dehydrogenase 1, patellin-3-like isoform X3, alcohol dehydrogenase class-3, NADP-dependent malic enzyme-like, glutamine synthetase precursor isoform X1, UTP—glucose-1-phosphate uridylyltransferase-like, enolase-phosphatase E1-like, luminal-binding protein, chloroplast stem-loop binding protein of 41 kDa a, chloroplastic-like, ketol-acid reductoisomerase, chloroplastic-like, fructose-bisphosphate aldolase 1, chloroplastic-like, stromal 70 kDa heat shock-related protein, chloroplastic-like, putative glucose-6-phosphate 1-epimerase-like, cucumisin-like isoform X2.

[0725] Proteins upregulated, normal watering conditions, in leaf tissue: photosystem II protein H, thylakoid lumenal 16.5 kDa protein, chloroplastic-like isoform X1, CDGSH iron-sulfur domain-containing protein NEET-like, lipoxygenase L-5, photosystem II 44 kDa protein, histone H4-like, thioredoxin-like protein CDSP32, chloroplastic-like, dirigent protein 1-like, 1-deoxy-D-xylulose 5-phosphate reductoisomerase, chloroplastic-like, probable 60S ribosomal protein L14-like, thylakoid lumenal 29 kDa protein, chloroplastic-like, stromal 70 kDa heat shock-related protein, chloroplastic-like, thioredoxin M4, chloroplastic-like, fructose-bisphosphate aldolase 1, chloroplastic-like, ruBisCO-associated protein, cucumisin-like isoform X2, LOW QUALITY PROTEIN: 50S ribosomal protein L11, chloroplastic-like, chloroplast stem-loop binding protein of 41 kDa a, chloroplastic-like, methionine synthase, ATP synthase CF1 alpha subunit, sedoheptulose-1,7-bisphosphatase, chloroplastic-like isoform 1.

[0726] Proteins downregulated, normal watering conditions, in leaf tissue: inositol-3-phosphate synthase, protease Do-like 2, chloroplastic-like, T-complex protein 1 subunit gamma-like, cell division protein FtsZ homolog 1, chloroplastic-like, protein CURVATURE THYLAKOID 1A, chloroplastic-like, magnesium-chelatase subunit ChlI, chloroplastic, THO complex subunit 4-like isoform X1, bifunctional aspartate aminotransferase and glutamate/aspartate-prephenate aminotransferase-like, beta-amylase precursor, UTP—glucose-1-phosphate uridylyltransferase-like, putative dihydroxy-acid dehydratase, mitochondrial-like, 3-ketoacyl-CoA thiolase 2, peroxisomal-like isoform X1, ketol-acid reductoisomerase, chloroplastic-like, putative lactoylglutathione lyase-like isoform X2.

[0727] Proteins upregulated, water-limited conditions, in root tissue: alcohol dehydrogenase class-3, enolase-phosphatase E1-like, DNA-damage-repair/toleration protein DRT100-like precursor, heat shock protein 90-1, 26S protease regulatory subunit 10B homolog A-like, glutamate—glyoxylate aminotransferase 2-like isoform 2, ketol-acid reductoisomerase, chloroplastic-like, lipoxygenase-9, 3-ketoacyl-CoA thiolase 2, peroxisomal-like isoform X1, luminal-binding protein, protein CURVATURE THYLAKOID 1A, chloroplastic-like, 50S ribosomal protein L6, chloroplastic-like isoform 1, aldehyde dehydrogenase family 3 member I1, chloroplastic-like, beta-amylase precursor, glutamine synthetase precursor isoform X1, peptidyl-prolyl cis-trans isomerase, chloroplastic isoform 1, UTP—glucose-1-phosphate uridylyltransferase-like, NADP-dependent malic enzyme-like, isocitrate dehydrogenase [NADP], fructose-bisphosphate aldolase 1, chloroplastic-like, stromal 70 kDa heat shock-related protein, chloroplastic-like, cell division protein FtsZ homolog 1, chloroplastic-like, peroxisomal (S)-2-hydroxy-acid oxidase GLO1-like isoform X1, lipoxygenase, lipoxygenase L-5.

[0728] Proteins downregulated, water-limited conditions, in root tissue: photosystem I P700 apoprotein A2, putative dihydroxy-acid dehydratase, mitochondrial-like, calcium-transporting ATPase 4, plasma membrane-type-like, abscisic stress ripening-like protein, 3′-hydroxy-N-methyl-(S)-coclaurine 4′-O-methyltransferase-like, sulfite reductase [ferredoxin], chloroplastic, THO complex subunit 4-like isoform X1, 60S ribosomal protein L4-like isoform 1, isocitrate dehydrogenase [NAD] catalytic subunit 5, mitochondrial-like, transketolase, chloroplastic, histone H4-like, peroxidase 50-like, thylakoid lumenal 29 kDa protein, chloroplastic-like, cysteine proteinase RD21a-like, bifunctional aspartate aminotransferase and glutamate/aspartate-prephenate aminotransferase-like, T-complex protein 1 subunit gamma-like, thioredoxin-like protein CDSP32, chloroplastic-like, aconitate hydratase 2, mitochondrial-like, delta-1-pyrroline-5-carboxylate synthase-like, asparagine synthetase, root [glutamine-hydrolyzing]-like, mitochondrial dicarboxylate/tricarboxylate transporter DTC-like.

[0729] Proteins upregulated, water-limited conditions, in leaf tissue: ruBisCO-associated protein, thioredoxin-like protein CDSP32, chloroplastic-like, methionine synthase, vicianin hydrolase-like, peroxidase 50-like, chloroplast stem-loop binding protein of 41 kDa a, chloroplastic-like, LOW QUALITY PROTEIN: 50S ribosomal protein L11, chloroplastic-like, isocitrate dehydrogenase [NADP], alcohol dehydrogenase 1, cucumisin-like isoform X2, aspartate aminotransferase glyoxysomal isozyme AAT1 precursor, aconitate hydratase 2, mitochondrial-like, lipoxygenase, cytochrome b6-f complex iron-sulfur subunit, chloroplastic-like, ATP synthase CF1 alpha subunit, cytochrome f, sedoheptulose-1,7-bisphosphatase, chloroplastic-like isoform 1, glutamate—glyoxylate aminotransferase 2-like isoform 2, luminal-binding protein, fructose-bisphosphate aldolase 1, chloroplastic-like, inositol-3-phosphate synthase, lipoxygenase-9, photosystem I P700 apoprotein A2, DNA-damage-repair/toleration protein DRT100-like precursor, DNA repair and recombination protein RAD26-like, mitochondrial dicarboxylate/tricarboxylate transporter DTC-like.

[0730] Proteins downregulated, water-limited conditions, in leaf tissue: protein CURVATURE THYLAKOID 1A, chloroplastic-like, putative glucose-6-phosphate 1-epimerase-like, 3-ketoacyl-CoA thiolase 2, peroxisomal-like isoform X1, probable histone H2B.3, ornithine carbamoyltransferase, chloroplastic-like, chaperonin CPN60-like 2, mitochondrial-like, putative lactoylglutathione lyase-like isoform X2, delta-1-pyrroline-5-carboxylate synthase-like, ATP synthase CF1 epsilon subunit, asparagine synthetase, root [glutamine-hydrolyzing]-like, putative dihydroxy-acid dehydratase, mitochondrial-like, cell division protein FtsZ homolog 1, chloroplastic-like, protease Do-like 2, chloroplastic-like, THO complex subunit 4-like isoform X1.

### Symbiosis Enhancement

### Nodulation

[0731] Malic enzyme has been shown to be important for carbon metabolism of bacteroids and free living bacteria by supplying acetyl-CoA for the TCA cycle or providing NADPH and pyruvate for various biosynthetic pathways (Dao et al., 2008). Soybean plants inoculated with a NAD(+)-dependent malic enzyme mutant formed small root nodules and exhibited significant nitrogen-deficiency symptoms (Dao et al., 2008). Under normal watering, predicted NADP-dependent malic enzyme-like was downregulated in roots.

### Nitrogen Metabolism

[0732] In most legumes, asparagine is the principal assimilation product of symbiotic nitrogen fixation (Scott et al., 1976). In soybean, high asparagine synthetase transcript level in source leaves is positively correlated with protein concentration of seed (Wan et al., 2006), and in roots, is linked with increased levels of asparagine in xylem sap transported to the shoot (Antunes et al., 2008). Under normal watering, predicted asparagine synthetase, root [glutamine-hydrolyzing]-like was upregulated in roots.

[0733] Glutamine and glutamate synthetases are enzymes responsible for assimilation of fixed ammonia during nitrogen fixation (Lara et al., 1983). In common bean (Phaseolus vulgaris) and in soy, nodule-specific forms of glutamine synthetase are produced in rhizobia-colonized nodules (Lara et al., 1983; Sengupta-Gopalan and Pitas, 1986), highlighting the enzyme's role in symbiosis. Under drought conditions, predicted glutamine synthetase precursor was upregulated in roots.

[0734] After assimilation, aspartate is the principal nitrogen transport compound (Robinson et al., 1994; Schultz et al., 1998). Aspartate aminotransferase, responsible for synthesis of aspartate from glutamate, is highly expressed in rhizobia-colonized root nodules of alfalfa (Robinson et al., 1994). Under normal watering, predicted bifunctional aspartate aminotransferase and glutamate/aspartate-prephenate aminotransferase-like was upregulated in roots. Under drought conditions, aspartate aminotransferase glyoxysomal isozyme AAT1 precursor was upregulated in leaves.

[0735] Methionine is an amino acid in the aspartate family (Hesse et al., 2004), important for nitrogen transport especially in plants hosting nitrogen-fixing bacteria (Robinson et al., 1994; Schultz et al., 1998). Under drought conditions, methionine synthase was upregulated in leaves.

[0736] In most legumes, asparagine is the principal assimilation product of symbiotic nitrogen fixation (Scott et al., 1976). In soybean, high asparagine synthetase transcript level in source leaves is positively correlated with protein concentration of seed (Wan et al., 2006), and in roots, is linked with increased levels of asparagine in xylem sap transported to the shoot (Antunes et al., 2008). Under drought conditions, predicted asparagine synthetase, root [glutamine-hydrolyzing]-like was downregulated in leaves.

### Growth Promotion

### Carbon Metabolism and Photosynthesis

[0737] Fructose-bisphosphate aldolase is a glycolytic enzyme, induced by the plant hormone gibberellin, that may regulate the vacuolar H-ATPase-mediated control of cell elongation that determines root length (Konishi et al., 2005). Under normal conditions, predicted fructose-bisphosphate aldolase 1, chloroplastic-like was upregulated in leaves.

[0738] Along with fructose-1,6-bisphosphatase, sedoheptulose-1,7-bisphosphatase participates in carbon metabolism in the reductive pentose phosphate cycle, with photoactivation via the ferredoxin/thioredoxin system (Nishizawa and Buchanan, 1981). Transgenic overexpression of sedoheptulose-1,7-bisphosphatase in tobacco resulted in enhanced photosynthetic efficiency and increased growth (Miyagawa et al., 2001). Under drought conditions, predicted sedoheptulose-1,7-bisphosphatase, chloroplastic-like isoform 1 was upregulated in leaves.

[0739] ATP synthase provides energy to the cell through the synthesis of adenosine triphosphate (ATP) from adenosine diphosphate (ADP) and inorganic phosphate (Pi). The ATP produced by the light reactions is then used by the dark reactions of photosynthesis to reduce CO2 to carbohydrates (McCarty, 1992). Changes in ATP synthase contents have been reported in response to changes in light intensity (Anderson et al., 1988), leaf age (Schottler et al., 2007a), and drought stress (Kohzuma et al., 2009). Under drought conditions, ATP synthase CF1 alpha subunit was upregulated in leaves.

[0740] Beta-amylase is a starch-hydrolyzing enzyme (Ishikawa et al., 2007). Starch metabolism is important for grain filling: for example, in rice, starch accumulated in leaf sheaths contributes 30% of the grain yield (Ishikawa et al., 1993; Hirose et al., 2006). Under drought conditions, beta-amylase precursor was upregulated in roots.

[0741] Ketol-acid reductoisomerase is involved in biosynthesis of branched-chain amino acids necessary for plant growth (Wong et al., 2012). Under drought conditions, predicted ketol-acid reductoisomerase, chloroplastic-like was upregulated in roots.

[0742] The photosystem II complex initiates photosynthesis by catalyzing electron transfer from water to the electron transport chain (Suorsa et al., 2004). Photosystem II protein H is a small, hydrophilic subunit of the PSII complex, possibly associated with the pigment proteins (Levey et al., 2014). Under normal watering, two PRI subunits, photosystem II protein H and a 44 kDa photosystem II protein, were upregulated in leaves.

[0743] The cytochrome b6f complex, highly conserved across plants, algae, and cyanobacteria (Sainz et al., 2000), is key to the electron transfer chain of photosynthesis (Allen, 2004). Under drought conditions, cytochrome f and predicted cytochrome b6-f complex iron-sulfur subunit, chloroplastic-like were upregulated in leaves.

[0744] A non-enzymatic, narbonin-like RuBisCO complex protein (RCP) was reported to accumulate in leaves following pod removal, but there is no evidence that it shares narbonin's role in storage and its function remains unknown (Mahato et al., 2004; Staswick, 1997; Staswick et al., 1994). Under drought conditions, this RuBisCO-associated protein was upregulated in leaves.

[0745] In plants, glyoxylate aminotransferases in the peroxisome participate in photorespiration, a pathway that salvages byproduct from RuBisCO's oxygenase activity (Liepman and Olsen, 2003). Under drought conditions, predicted glutamate-glyoxylate aminotransferase 2-like isoform 2 was upregulated in roots and leaves.

[0746] Increases in organic acid metabolism support a shift in carbon metabolism that accommodates increased nitrate assimilation (Scheible et al., 2000). Isocitrate dehydrogenase is a metabolic enzyme in organic acid metabolism (Scheible et al., 2000), and dicarboxylate/tricarboxylate transporters are responsible for compartmentation of organic acids necessary to maintain cytosolic enzyme functions (Regalado et al., 2012). Under normal watering, predicted isocitrate dehydrogenase [NADP] and predicted mitochondrial dicarboxylate/tricarboxylate transporter DTC-like were upregulated in roots. Under drought conditions, predicted isocitrate dehydrogenase [NADP] was upregulated in leaves.

[0747] Aconitate hydratase, or aconitase, is a key enzyme converts citrate to isocitrate, participating in the cytosolic glyoxylate cycle, related to photorespiration, in cytosolic citrate metabolism, related to the balance of nitrate and organic acid metabolism, and in the mitochondrial tricarboxylic acid cycle (Arnaud et al., 2007; Peyret et al., 1995; Scheible et al., 2000; Terol et al., 2010). Under drought conditions, predicted aconitate hydratase 2, mitochondrial-like was upregulated in leaves.

[0748] Chloroplast stem-loop binding proteins have been shown to regulate mRNA stability of chloroplast precursor mRNAs via pre-processing and degradation (Monde et al., 2000; Yang et al., 1996). Under drought conditions, predicted chloroplast stem-loop binding protein of 41 kDa a, chloroplastic-like was upregulated in leaves.

[0749] CURVATURE THYLAKOID 1A (CURT1A) is active in the chloroplast, modifying thylakoid architecture and interacting with vesicle transport (Lindquist and Aronsson, 2014). Under drought conditions, predicted protein CURVATURE THYLAKOID 1A, chloroplastic-like was upregulated in roots.

[0750] Thylakoid luminal proteins are those localized to the lumen between thylakoid membranes in the chloroplast, participating in various functions (Konishi et al., 1993). Under normal watering, predicted thylakoid luminal 16.5 kDa and 29 kDa proteins, chloroplastic-like were upregulated in leaves.

[0751] ATP synthase provides energy to the cell through the synthesis of adenosine triphosphate (ATP) from adenosine diphosphate (ADP) and inorganic phosphate (Pi). The ATP produced by the light reactions is then used by the dark reactions of photosynthesis to reduce CO2 to carbohydrates (McCarty, 1992). Changes in ATP synthase contents have been reported in response to changes in light intensity (Anderson et al., 1988), leaf age (Schottler et al., 2007a), and drought stress (Kohzuma et al., 2009). Under drought conditions, ATP synthase CF1 epsilon subunit was downregulated in leaves.

[0752] Glucose-6-phosphate 1-epimerase is involved in ATP production via glycolysis and gluconeogenesis (Sun et al., 2014; Wurster and Hess, 1972). Under drought conditions predicted putative glucose-6-phosphate 1-epimerase-like was downregulated in leaves.

[0753] Chloroplast transketolase participates in carbon metabolism via the Calvin-Benson-Bassham cycle and the oxidative pentose phosphate pathway, and may have a role in regulating carbon allocation under light and dark conditions (Rocha et al., 2014). Under drought conditions, a predicted chloroplastic transketolase was downregulated in roots.

[0754] The photosystem I complex completes photosynthesis by catalyzing oxidation of plastocyanin and reduction of ferredoxin, the final steps of electron transport (Schottler et al., 2007b). Within photosystem I, the P700 chlorophyll a protein is a chlorophyll-binding protein that accumulates in response to light via translational regulation (Kreuz et al., 1986). Under drought conditions, photosystem I P700 apoprotein A2 was downregulated in roots.

[0755] In plants, glyoxylate aminotransferases in the peroxisome participate in photorespiration, a pathway that salvages byproduct from RuBisCO's oxygenase activity (Liepman and Olsen, 2003). Under normal watering, predicted glutamate—glyoxylate aminotransferase 2-like isoform 2 was downregulated in roots.

[0756] Increases in organic acid metabolism support a shift in carbon metabolism that accommodates increased nitrate assimilation (Scheible et al., 2000). Isocitrate dehydrogenase is a metabolic enzyme in organic acid metabolism (Scheible et al., 2000), and dicarboxylate/tricarboxylate transporters are responsible for compartmentation of organic acids necessary to maintain cytosolic enzyme functions (Regalado et al., 2012). Under drought conditions, predicted isocitrate dehydrogenase [NAD] catalytic subunit 5, mitochondrial-like was downregulated in roots.

[0757] Chloroplast stem-loop binding proteins have been shown to regulate mRNA stability of chloroplast precursor mRNAs via pre-processing and degradation (Monde et al., 2000; Yang et al., 1996). Under normal watering, predicted chloroplast stem-loop binding protein of 41 kDa b, chloroplastic-like isoform X2 was downregulated in roots.

[0758] CURVATURE THYLAKOID 1A (CURT1A) is active in the chloroplast, modifying thylakoid architecture and interacting with vesicle transport (Lindquist and Aronsson, 2014). Under normal watering, predicted protein CURVATURE THYLAKOID 1A, chloroplastic-like was downregulated in leaves. Under drought conditions, this protein was downregulated in leaves.

[0759] Magnesium chelatase is the first unique enzyme in chlorophyll biosynthesis, and may be regulated by abscisic acid in some species (Müller and Hansson, 2009; Shen et al., 2006). Under normal watering, a predicted chloroplastic magnesium-chelatase subunit (ChlI) was downregulated in roots.

### Cell Wall

[0760] In plants, peroxidases are involved in cell wall lignification, usually associated with pathogen resistance (Bruce and West, 1989), abiotic stress (Huttova et al., 2006; Quiroga et al., 2001), or cell wall modification during growth (Van Hoof and Gaspar, 1976; Kukavica et al., 2012). Under drought conditions, predicted peroxidase 50-like was upregulated in leaves.

[0761] UTP-glucose-1-phosphate uridylyltransferase provides UDP-glucose, an important substrate for cell wall polysaccharide biosynthesis (Cook et al., 2012; Hertzberg et al., 2001). Under drought conditions predicted UTP-glucose-1-phosphate uridylyltransferase-like was upregulated in roots.

[0762] Dirigent proteins have a chaperone-like role in selecting the stereochemistry or regiospecificity in enzyme reactions involving radical-radical coupling, including the formation of lignans, norlignans, and ellagitannins important in vasculature and plant defense (Davin and Lewis, 2005). Under normal watering, predicted dirigent protein 1-like was upregulated in leaves.

### Developmental Regulation

[0763] The THO complex is a factor composed of four polypeptides that associates with RNA and DNA to facilitate transcription elongation (Jimeno et al., 2002; Rondon et al., 2003). Under normal watering, predicted THO complex subunit 4-like isoform X1 was upregulated in roots.

[0764] The ribosome is essential for translation of mRNA into proteins in all living organisms. In eukaryotes, the ribosome is composed of a large 60S subunit and a small 40S subunit; in bacteria and plastids, these are smaller 50S and 30S subunits, respectively (Ben-Shem et al., 2011). Chloroplastic 50S ribosomal proteins are involved in synthesis of organelle-specific proteins in the chloroplast (Bartsch et al., 1982). Under normal watering, predicted probable 60S ribosomal protein L14-like was upregulated in leaves. Under drought conditions predicted 50S ribosomal protein L6, chloroplastic-like isoform 1 was upregulated in roots, and predicted 50S ribosomal protein L11, chloroplastic-like was upregulated in leaves.

[0765] Histones are primarily involved in DNA packaging into chromatin, a process that modifies gene expression. Recent studies show that the developmental transition from a vegetative to a reproductive phase (i.e. flowering) is controlled by chromatin modifications (He, 2009). Under normal watering, predicted histone H4-like was upregulated in leaves.

[0766] The proteasome is a complex of multiple subunits, including protease and regulatory subunits, that degrades proteins in response to regulatory signaling, including ubiquitination (Smalle et al., 2002). Under normal watering, predicted proteasome subunit alpha type-5-like was upregulated in roots. Under drought conditions, predicted 26S protease regulatory subunit 10B homolog A-like was upregulated in roots.

[0767] Cucumisin is a protease in the family of subtilases, which carry out regulatory roles as well as protein degradation in plants, including breakdown of storage proteins, xylem differentiation, and pathogen defense (Schaller, 2004; Yamagata et al., 1994). Under drought conditions, predicted cucumisin-like isoform X2 was upregulated in leaves.

[0768] Cysteine proteases and proteinases participate in developmental regulation, including accumulation and degradation of storage proteins, senescence, and programmed cell death (Schaller, 2004). Under normal watering, predicted cysteine proteinase RD21a-like was upregulated in roots.

[0769] Enolase-phosphatase is a highly conserved, bifunctional enzyme participating in the methionine salvage pathway associated with biosynthesis of methionine and ethylene, maintaining efficiency of those processes by recovering their byproducts (Albers, 2009). Under drought conditions, predicted enolase-phosphatase E1-like was upregulated in roots.

[0770] CDGSH iron-sulfur domain-containing proteins (CISDs), in the NEET family, are highly conserved proteins capable of both electron accepting and electron donating, targeted to the mitochondrion or the chloroplast, and involved in developmental and homeostatic regulation (Su et al., 2013; Tamir et al., 2015). Under normal watering, predicted CDGSH iron-sulfur domain-containing protein NEET-like was upregulated in leaves.

[0771] The THO complex is a factor composed of four polypeptides that associates with RNA and DNA to facilitate transcription elongation (Jimeno et al., 2002; Rondón et al., 2003). Under drought conditions, predicted THO complex subunit 4-like isoform X1 was downregulated in roots.

[0772] The ribosome is essential for translation of mRNA into proteins in all living organisms. In eukaryotes, the ribosome is composed of a large 60S subunit and a small 40S subunit; in bacteria and plastids, these are smaller 50S and 30S subunits, respectively (Ben-Shem et al., 2011). Chloroplastic 50S ribosomal proteins are involved in synthesis of organelle-specific proteins in the chloroplast (Bartsch et al., 1982). Under drought conditions, predicted 60S ribosomal protein L4-like isoform 1 was downregulated in roots.

[0773] Histones are primarily involved in DNA packaging into chromatin, a process that modifies gene expression. Recent studies show that the developmental transition from a vegetative to a reproductive phase (i.e. flowering) is controlled by chromatin modifications (He, 2009). Under drought conditions, predicted probable histone H2B.3 was downregulated in leaves.

[0774] Leucine aminopeptidases (LAPs) are enzymes involved in protein turnover and, in some classes of LAPs, wounding responses (Scranton et al., 2013; Waditee-Sirisattha et al., 2011). Under normal watering, a predicted chloroplastic leucine aminopeptidase 3 was downregulated in roots.

[0775] Molecular chaperones have significant functional conservation across all domains of life. These proteins are implicated in facilitating proper folding of nascent polypeptides through binding of nonnative proteins to inhibit aggregation with other proteins and cellular structures. The CPN60 family of chaperonins include HSP60 chaperones found in bacteria, mitochondria and chloroplasts and the TCP-1 complex of chaperones deployed by eukaryotes and archaea (Fink, 1999). Under drought conditions, predicted chaperonin CPN60-like 2, mitochondrial-like was downregulated in leaves.

[0776] Endoplasmin is heat-shock protein 90-B1 (HSP90B1) (Cawthorn et al., 2012), a molecular chaperone in a heat shock protein family involved in signal transduction, cell cycle control, and protein folding, transport, and degradation (Chen et al., 2006). In Arabidopsis, HSP90.1 was found to participate in RPS2-mediated disease resistance (Takahashi et al., 2003). Under normal watering predicted endoplasmin homolog isoform X2 was downregulated in roots.

[0777] T-complex proteins are molecular chaperones involved in assembly and quality control of other protein (Mori et al., 1992). Under normal watering, predicted T-complex protein 1 subunit gamma-like was downregulated in leaves.

[0778] Ornithine carbamoyltransferase (OCT) is one of several enzymes required for the metabolism of arginine in plants. Arginine is an important and abundant constituent of storage proteins that are present in legume seeds. OCT activity varies with time during seed development and also following germination in pea and fava bean plants (Kollöffel and Stroband, 1973; Ruiter and Kollöffel, 1982). Under drought conditions, predicted ornithine carbamoyltransferase, chloroplastic-like was downregulated in leaves.

[0779] Calcium signaling is important for regulating many aspects of plant development and stress responses, and calcium pumps are essential to this regulatory activity (Boursiac et al., 2010). Under drought conditions, predicted calcium-transporting ATPase 4, plasma membrane-type-like was downregulated in roots.

[0780] Dihydroxy-acid dehydratase is the third enzyme in biosynthesis of branched-chain amino acids key to plant growth, including valine, leucine, isoleucine, and CoA (Flint and Emptage, 1988), and may be regulated by ROS and redox signaling via the ferredoxin/thioredoxin system (Balmer et al., 2006). Under drought conditions, predicted putative dihydroxy-acid dehydratase, mitochondrial-like was downregulated in roots and leaves.

[0781] Sulfur is required for the biosynthesis of many important biological molecules including amino acids and metalloproteins. Sulfite reductases are integral in the assimilation of sulfur into cysteine by catalyzing the reduction of sulfite to sulfide. In maize and pea, sulfite reductase has implicated in nucleoid-compaction; specifically in pea this compaction causes a reduction in transcriptional activity in plastid nucleoids (Sekine et al., 2007). Under drought conditions, a predicted chloroplastic sulfite reductase was downregulated in roots.

[0782] The bacterial cell division protein FtsZ is an ancestral tubulin involved in cell division of plastids in plants (Strepp et al., 1998). Under normal watering, predicted cell division protein FtsZ homolog 1, chloroplastic-like was downregulated in leaves.

### Resistance to Abiotic and Biotic Stresses

### Abiotic Stresses

[0783] In plants, alcohol dehydrogenase, a highly conserved enzyme, is induced by stress conditions, particularly during hypoxic response, to anaerobically supply NAD+ for metabolism (Chung and Ferl, 1999). Under drought conditions, predicted alcohol dehydrogenase 1 was upregulated in leaves, while predicted alcohol dehydrogenase class-3

[0784] Aldehyde dehydrogenases are members of the NAD(P)(+)-dependent protein superfamily involved in the conversion of various aldehydes to their corresponding nontoxic carboxylic acids (Brocker et al., 2013). Aldehyde dehydrogenases are involved in a wide range of metabolic pathways including growth, development, seed storage, and environmental stress adaptation in higher plants (Rodrigues et al., 2006; Brocker et al., 2013). Under drought conditions, predicted aldehyde dehydrogenase family 3 member I1, chloroplastic-like were upregulated in roots.

[0785] Peroxisomal 3-ketoacyl-CoA thiolase functions in fatty acid β-oxidation with broad substrate specificity, important particularly in seedlings for accessing stored lipids for carbon and energy during early growth (Germain et al., 2001). Derivatives of very-long-chain fatty acids (20 or more carbons) act as protective barriers between plants and the environment, provide energy storage in seeds, and function as signaling molecules in membranes (Devaiah et al., 2006; Pollard et al., 2008). Under drought conditions, predicted 3-ketoacyl-CoA thiolase 2, peroxisomal-like isoform X1 was upregulated in roots.

[0786] Thioredoxins are implicated in different aspects of plant life including development and adaptation to environmental changes and stresses. They act as antioxidants by facilitating the reduction of other proteins by cysteine thiol-disulfide exchange (Nordberg and Arnér, 2001). Under normal watering, predicted thioredoxin M4, chloroplastic-like and predicted thioredoxin-like protein CDSP32, chloroplastic-like were upregulated in leaves. Under drought conditions, predicted thioredoxin-like protein CDSP32, chloroplastic-like was upregulated in leaves.

[0787] Peptidyl prolyl cis-trans isomerases are molecular chaperones that participate in protein folding and signal transduction (Aviezer-Hagai et al., 2006). In Arabidopsis, the two peptidyl prolyl cis-trans isomerases ROF1 and ROF2 possess different tissue-specific, developmentally regulated, and heat-inducible expression patterns (Aviezer-Hagai et al., 2006). ROF2 has also been shown to participate in intracellular pH homeostasis in Arabidopsis (Bissoli et al., 2012). Under normal watering, predicted peptidyl-prolyl cis-trans isomerase CYP20-2, chloroplastic-like isoform 1 was upregulated in roots. Under drought conditions, predicted chloroplastic peptidyl-prolyl cis-trans isomerase was upregulated in roots.

[0788] Abiotic stresses and pathogen attack can result in accumulated DNA damage and eventual genotoxic stress, necessitating coordination of DNA repair in response to environmental stress (Doná et al., 2013). RAD26 is a nucleotide excision repair protein first identified in yeast (van Gool et al., 1994), with homologs later identified in plants (Heitzeberg et al., 2004; Liu et al., 2000). DRT-100 is a DNA-damage-repair/toleration gene associated with UV damage (Hays and Pang, 1994; Pang et al., 1993). Under normal watering, predicted DNA repair and recombination protein RAD26-like was upregulated in roots. Under drought conditions, DNA-damage-repair/toleration protein DRT100-like precursor was upregulated in roots.

[0789] The heat-shock proteins are molecular chaperones expressed under various stresses to stabilize proteins (De Maio, 1999). Under normal watering, predicted stromal 70 kDa heat shock-related protein, chloroplastic-like was upregulated in leaves. Under drought conditions, heat shock protein 90-1 was upregulated in roots.

[0790] The luminal binding proteins (BiP) are molecular chaperones in the endoplasmic reticulum, participating in protein folding and quality control processes (Valente et al., 2009). Studies in Arabidopsis, tobacco, and soy have shown that BiP protects against heat and drought stress (Koizumi, 1996; Valente et al., 2009). Under drought conditions, predicted luminal-binding protein was upregulated in roots.

[0791] In plants, alcohol dehydrogenase, a highly conserved enzyme, is induced by stress conditions, particularly during hypoxic response, to anaerobically supply NAD+ for metabolism (Chung and Ferl, 1999). Under normal watering, predicted alcohol dehydrogenase 1 and predicted alcohol dehydrogenase class-3 were downregulated in roots.

[0792] Peroxisomal 3-ketoacyl-CoA thiolase functions in fatty acid β-oxidation with broad substrate specificity, important particularly in seedlings for accessing stored lipids for carbon and energy during early growth (Germain et al., 2001). Derivatives of very-long-chain fatty acids (20 or more carbons) act as protective barriers between plants and the environment, provide energy storage in seeds, and function as signaling molecules in membranes (Devaiah et al., 2006; Pollard et al., 2008). Under drought conditions, predicted 3-ketoacyl-CoA thiolase 2, peroxisomal-like isoform X1 was downregulated in leaves.

[0793] The Do proteases, also called Deg and HtrA (Ponting, 1997), are ATP-independent serine endopeptidases common across all domains of organisms (Schuhmann and Adamska, 2012). In plants, Deg proteases conduct protein turnover and cellular regulation primarily in the chloroplast to combat photodamage, but also in the peroxisome to support β-oxidation processes (Schuhmann and Adamska, 2012). Under normal watering, predicted protease Do-like 2, chloroplastic-like was downregulated in leaves.

[0794] Myo-inositol 3-phosphate synthase is the first enzyme in myo-inositol biosynthesis, and its overexpression has been shown to increase salt tolerance in multiple plant species via activation of basal metabolism, inositol metabolism, glycolysis, the pentose phosphate pathway, and the tricarboxylic acid cycle (Kusuda et al., 2015). Under normal watering, predicted inositol-3-phosphate synthase was downregulated in leaves.

[0795] Lactoylglutathione lyase (glyoxalase I) participates in the glyoxalase pathway to detoxify methylglyoxal, a cytotoxic molecule associated with abiotic stresses (Mustafiz et al., 2011). Overexpression of lactoylglutathione lyase has been shown to provide tolerance to salinity and heavy metal stress (Mustafiz et al., 2011). Under drought conditions, predicted putative lactoylglutathione lyase-like isoform X2 was downregulated in leaves.

[0796] Delta-1-pyrroline-5-carboxylate synthase, the first enzyme in biosynthesis of the osmoprotectant proline, is induced by salt stress and associated with protection from osmotic stress (Ginzberg et al., 1998; Hong et al., 2000). Under drought conditions, predicted delta-1-pyrroline-5-carboxylate synthase-like was downregulated in leaves.

[0797] Abscisic acid stress ripening proteins (Asr), a DNA-binding protein that improves drought and salinity tolerance, is upregulated by water stress, salt stress, and the hormone abscisic acid, as well as by developmental regulation (Goldgur et al., 2007; Kalifa et al., 2004). Under drought conditions, abscisic stress ripening-like protein was downregulated in roots.

### Biotic Stresses

[0798] Lipoxygenases catalyze the dioxygenation of polyunsaturated fatty acids in oxylipins, a group of lipids that include j asmonic acid (JA) and its derivatives, and which are involved in a number of developmental and stress response processes (Andersson et al., 2006). Oxilipins may exert protective activities either as signaling molecules in plants during development, wounding, insect and pathogen attack, or as direct anti-microbial substances that are toxic to the invader (Yan et al., 2013). Under normal watering, one lipoxygenase was upregulated in leaves. Under drought conditions, a second lipoxygenase was upregulated in leaves, and a third in roots.

[0799] 1-deoxy-D-xylulose 5-phosphate reductoisomerase is an enzyme in the plastidial, nonmevalonate pathway for biosynthesis of isoprenoids, including the terpenoids, which serve key roles in plant defense (Lange and Croteau, 1999). Under normal watering, predicted 1-deoxy-D-xylulose 5-phosphate reductoisomerase, chloroplastic-like was upregulated in leaves.

[0800] Patellins contain a Sec14 domain, implicated in lipid signaling, lipid metabolism, and membrane trafficking, and they have been shown to be involved in Arabidopsis root cell division and interference with viral movement proteins (MPs) that coordinate inter- and intracellular viral localization (Peiro et al., 2014). Under normal watering, predicted patellin-3-like isoform X3 was downregulated in roots.

[0801] (S)-2-hydroxy-acid oxidase, also called glycolate oxidase (Schomburg and Stephan, 1995), participates in photorespiration and in defense responses to pathogens (Chern et al., 2013). Interestingly, downregulation of GLO genes in rice resulted in greater pathogen resistance, possibly due to induction of basal resistance (Chern et al., 2013). Under normal watering, predicted peroxisomal (S)-2-hydroxy-acid oxidase GLO1-like isoform X1 was downregulated in roots.

[0802] 3′-hydroxy-N-methyl-(S)-coclaurine 4′-O-methyltransferase participates in alkaloid biosynthesis and synthesis of cysteine and adenosine, by producing the intermediates (S)-reticuline and S-adenosyl-L-homocysteine (Frenzel and Zenk, 1990). Under drought conditions, 3′-hydroxy-N-methyl-(S)-coclaurine 4′-O-methyltransferase-like, an enzyme in this pathway, was downregulated in roots.

### Example 10: Identification of Differentially Regulated Hormones

### Methods

[0803] For hormone analysis, 100±10 mg tissue was measured into microtubes (chilled with liquid nitrogen), and sent on dry ice to the lab of Dr. Michael Kolomiets in the Department of Plant Pathology and Microbiology at Texas A&M University. Plant hormone analysis was performed per Christiansen et al. (2014) with slight modification. Briefly, hormones were extracted from 100±10 mg of frozen tissue and tissue weights were recorded for quantification. A mixture containing 10 microliters of 2.5 microMolar internal standards and 500 microliters of extraction buffer [1-propanol/H20/concentrated HCl (2:1:0.002, vol/vol/vol) was added to each sample and vortexed until thawed. Samples were agitated for 30 min at 4° C., then 500 microliters of dichloromethane (CH2C12) were added. Samples were agitated again for 30 min at 4° C., and then centrifuged at 13,000×g for 5 min. in darkness. The lower organic layer was removed into a glass vial and the solvent was evaporated by drying samples for 30-40 min under a N2 stream. Samples were re-solubilized in 150 microliters of MeOH, shaken for 1 min and centrifuged at 14,000×g for 2 min. A supernatant of 90 microliters was transferred into the autosampler vial and hormones were analyzed by ultraperformance liquid chromatography, coupled to mass spectrometry (UPLC-MS/MS). Ascentis Express C-18 Column (3 cm×2.1 mm, 2.7 cm) connected to an API 3200 using electrospray ionization-tandem mass spectrometry (MS/MS) with scheduled multiple reaction monitoring (SMRM). The injection volume was 5 microliters and had a 300 microliters/min mobile phase consisting of Solution A (0.05% acetic acid in water) and Solution B (0.05% acetic acid in acetonitrile) with a gradient consisting of (time-% B): 0.3—1%, 2—45%, 5—100%, 8—100%, 9—1%, 11—stop. Quantitation was carried out with Analyst software (AB Sciex), using the internal standards as a reference for extraction recovery. Leaf and root tissue was saved in −62° C. and saved for subsequent gene expression analysis.

[0804] Mass spectra of 8 plant hormones were obtained: jasmonic acid (JA), jasmonic acid-isoleucine (JA-Ile), salicylic acid (SA), abscisic acid (ABA), 12-oxo-phytodienoic acid (OPDA), 10-oxo-11 phytoenoic acid (OPEA), traumatic acid (TA) and cinnaminic acid (CA). Fold changes between control and treated samples were calculated by dividing the mass spectrum value from the treated sample by the value from the control sample.

### Results

[0805] All results are summarized in Table 9.

[0806] The plant hormone analysis of soybean plants inoculated with endophytic fungal strain Strain B grown under normal and water-limiting conditions in the greenhouse revealed that Strain B augmented and modified hormone levels in different tissue types and growth conditions in planta.

[0807] Our data shows that the levels of the plant hormone abscisic acid (ABA) were decreased in Strain B-treated plants compared to plants grown from seed treated with formulation only, grown under normal and water-limiting conditions, in all three tissue types except stem tissue under normal watering regime. ABA is involved in regulation of developmental processes such as seed maturation and dormancy (Baker et al., 1988), responses to environmental stresses (Shinozaki and Yamaguchi-Shinozaki, 2000) including stomatal closure (McAinsh, 1990) and expression of stress-related genes (Urao et al., 1993). Thus, plants treated with compositions such as Strain B may have an improved ability to cope with the stresses associated with normal and water-limited conditions, via modulation of expression of ABA.

[0808] Salicylic acid (SA) and cinnamic acid (CA) are upregulated in roots under normal condition and stems and leaves under drought, and CA is upregulated in stems under normal condition. They are down-regulated in leaves under normal condition and roots under drought and SA is downregulated in stems under normal condition. SA is considered one of the key endogenous component involved in local and systemic defense responses in plants (Shah and Klessig, 1999). At the infection site, plant triggers localized programmed cell death, a phenomenon known as the hypersensitive response (Caplan et al., 2008), followed by accumulation of SA, and an induction of pathogenesis-related proteins in distal tissues to protect plants from secondary infections. This type of protection is called systemic acquired resistance (SAR) and it provides broad-spectrum resistance against pathogenic fungi, oomycetes, bacteria and viruses (Shah and Klessig, 1999). SAR is associated with significant transcriptional reprogramming, which is dependent on the transcription cofactor NPR1 and its associated transcription factors (Dong, 2004). Protective effect of SAR can last for months, and possibly even throughout the whole growing season (Kuc, 1987). SA is synthesized through phenylpropanoid pathway from cinnamic acid (CA) via two possible pathways (Klambt, 1962; el-Basyouni et al., 1964). Cinnamic acid is a precursor for biosynthesis of the polyphenol compounds (Lee et al., 1995) that have multiple functions, such as providing mechanical support (lignins) (Whetten and Sederoff, 1992), protection against abiotic and biotic stress (antioxidants) (Dixon and Paiva, 1995), and signaling with the flavonoid nodulation factors (Weisshaar and Jenkins, 1998). The upregulated levels of SA and CA under both growth conditions is consistent with recent studies showing that plants respond to endophytic colonization by local defense responses (Compant et al., 2005), but the levels of expression are much lower than when plants are challenged with the pathogen (Bordiec et al., 2011), allowing the endophyte to systemically colonize the plant (Reinhold-Hurek and Hurek, 2011). Thus, plants treated with compositions such as Strain B may have an improved ability to cope with the stresses associated with normal and water-limited conditions, via modulation of expression of SA and/or CA.

[0809] Jasmonic acid (JA) and its derivative jasmonic acid isoleucine (JA-Ile) are up-regulated in leaves of Strain B-treated plants grown normal watering condition and in roots of plants grown under water-limited conditions and JA-Ile in stems under the same condition. JA and JA-Ile are down-regulated in roots and stems of Strain B-treated plants grown normal watering condition and in leaves of plants grown under water-limited conditions and JA in stems under the same condition. Jasmonates (JAs) are formed by the enzymatic action of 13-LOX on linolenic acid that enables production of 12-oxo-phytodienoic acid (OPDA) and its downstream products such as free JA, MeJA, cis-jasmone and JA-Ile (Göbel and Feussner, 2009). JAs are a type of oxylipins, that are involved in a number of developmental or stress response processes (Andersson et al., 2006) and they exert protective activities either as signaling molecules in plants during development, wounding, insect and pathogen attack, or direct anti-microbial substances that are toxic to the invader (Yan Y et al., 2013). The opposite pattern of expression under both normal and drought conditions of JA and JA-Ile with SA and CA is in line with well documented literature that SA and JA act antagonistically (Beckers and Spoel, 2006). Thus, plants treated with compositions such as Strain B may have an improved ability to cope with the stresses associated with normal and water-limited conditions, via modulation of expression of JA and/or JA-Ile.

[0810] 12-oxo-phytodienoic acid (OPDA) levels are downregulated in all 3 tissue types in Strain B-treated plants grown under normal watering conditions and upregulated in all 3 tissue types in Strain B-treated plants grown under water-limited conditions. OPDA is a type of oxylipins, that are involved in a number of developmental or stress response processes (Andersson et al., 2006) and they exert protective activities either as signaling molecules in plants during development, wounding, insect and pathogen attack, or direct anti-microbial substances that are toxic to the invader (Yan Y et al., 2013). Thus, plants treated with compositions such as Strain B may have an improved ability to cope with the stresses associated with normal and water-limited conditions, via modulation of expression of OPDA.

[0811] 10-oxo-11-phytoenoic acid (OPEA) is upregulated in roots and leaves under normal and roots and stems under water-limited conditions and downregulated in stems under normal and leaves under water-limited conditions. OPEA is produced in a pathway involving 9-LOX activity on linoleic acid. Despite structural similarity to jasmonates, physiological roles for OPEA is not well understood. This hormone is highly induced at the site of pathogen infection and it can suppress the growth of mycotoxigenic fungi suggesting more specialized roles in local defense reactions (Christensen et al., 2015). Thus, plants treated with compositions such as Strain B may have an improved ability to cope with the stresses associated with normal and water-limited conditions, via modulation of expression of OPEA.

[0812] Levels of traumatic acid (TA) are down-regulated in roots, stems and leaves of Strain B-treated plants grown under normal watering conditions and are downregulated in stems of Strain B-treated plants grown under water-limited conditions. TA is upregulated in roots and leaves of Strain B-treated plants grown under water-limited conditions. Traumatic acid, which is produced from both linoleic acid and linolenic acids, is a plant wound hormone associated with cell proliferation in plants (Vick and Zimmerman, 1987) and causes abscission in cotton buds (Strong and Kruitwagen, 1967). Thus, plants treated with compositions such as Strain B may have an improved ability to cope with the stresses associated with normal and water-limited conditions, via modulation of expression of TA.

### Example 11: Identification of Differentially Regulated Metabolites (Metabolomics)

### Methods

[0813] For metabolite analysis, 150±10 mg of each sample was transferred into 1.5 mL microtubes (chilled in liquid nitrogen) and sent on dry ice to the Proteomics and Metabolomics Facility at Colorado State University. Metabolomics data acquisition was performed per the following methods provided by Dr. Corey Broeckling at CSU. To prepare the samples for analysis, phytohormones were extracted from ground plant material using a biphasic protocol. One mL of a methyl tert-butyl ether (MTBE): methanol:water mixture (6:3:1) was added to each sample then shaken for 1 hour. Next, 250 microliters cold water and a mix of internal standards was added to each sample to promote phase separation. Samples were shaken again for 5 minutes. Samples were then centrifuged at 2,095×g at 4° C. for 15 minutes. The organic top phase was removed for hormone analysis, dried under an inert nitrogen environment, then re-suspended in 400 microliters of 50% acetonitrile. Extracts were then directly analyzed by LC-MS.

[0814] For GC-MS, the polar (lower phase) extract was dried using a speedvac, resuspended in 50 microliters of pyridine containing 50 mg/mL of methoxyamine hydrochloride, incubated at 60° C. for 45 min, sonicated for 10 min, and incubated for an additional 45 min at 60° C. Next, 25 microliters of N-methyl-N-trimethylsilyltrifluoroacetamide with 1% trimethylchlorosilane (MSTFA+1% TMCS, Thermo Scientific) was added and samples were incubated at 60° C. for 30 min, centrifuged at 3000×g for 5 min, cooled to room temperature, and 80 microliters of the supernatant was transferred to a 150 microliters glass insert in a GC-MS autosampler vial. Metabolites were detected using a Trace GC Ultra coupled to a Thermo ISQ mass spectrometer (Thermo Scientific). Samples were injected in a 1:10 split ratio twice in discrete randomized blocks. Separation occurred using a 30 m TG-5MS column (Thermo Scientific, 0.25 mm i.d., 0.25 micrometer film thickness) with a 1.2 mL/min helium gas flow rate, and the program consisted of 80° C. for 30 sec, a ramp of 15° C. per min to 330° C., and an 8 min hold. Masses between 50-650 m/z were scanned at 5 scans/sec after electron impact ionization. The ionization source was cleaned and retuned and the injection liner replaced between injection replicates. Analysis for plant hormones was performed by UPLC-MS/MS as follows.

[0815] Over 1250 metabolites were detected and mass spectra annotated by comparing to libraries of known spectra including an in-house database of ˜1200 compounds at CSU (LC-MS only), the National Institute of Standards and Technology databases, Massbank MS database, and the Golm Metabolite Database. Initial annotation was automated, followed by manual validation of annotations. Following annotation, approximately 160 compounds were identified. After removal of technical artifacts (e.g. siloxane), and ambiguous or vague annotations (e.g. carbohydrate or saccharide), 145 identified compounds remained for analysis. These compounds were assessed for fold change over control plants. Metabolites were grouped by pathways (e.g. carbohydrate metabolism or alkaloid biosynthesis) and the KEGG database and literature were manually referenced to identify pertinent shifts in metabolic patterns in plants treated with microbes. Any compound without an appreciable shift compared to that observed in control plants was removed from further analysis

### Results

[0816] All results are summarized in Table 10A (normal watering conditions) and Table 10B (water-limited conditions).

[0817] An important metabolic system in plants involves the production of phenylpropanoid compounds. The production of a wide variety of phenylpropanoids is induced under stress conditions and important plant signaling molecules, e.g. salicylic acid, are derived from phenylpropanoid precursors (Dixon and Paiva, 1995). The shikimic acid pathway sits atop many of these mechanisms as it produces the cyclic amino acids that constitute the raw materials for many defense compounds that can be induced upon biotic or abiotic challenge. The stresses that can induce production of various stress-related phenylpropanoid pathways include, but are not limited to, pathogen challenge (phytoalexins), wounding (lignins), and nutrient deficiency (flavonoids and isoflavonoids). Beneficial Penicillium endophyte treatments showed modulation of phenylpropanoid production under well-watered and drought conditions, often in a tissue-specific manner, as well as causing alterations in the levels of aromatic amino acid precursors (phenylalanine, tyrosine, tryptophan) that feed into these pathways. Lignin, for example, is an important structural component in plants, second in abundance only to cellulose. There is some evidence that lignin biosynthesis genes are upregulated in the root tissue of plants under various stages of drought stress (Moura et al., 2010), the rationale being root growth will be stimulated when plants are at a water deficit. Under the conditions tested there was a reduction in the quantity of lignin precursors (ferulic acid, caffeic acid) in well-watered plant roots treated with Strain B (relative to control). By contrast there was an increase in these metabolites in plants subjected to drought and treated with the same microbe.

[0818] Another diverse group of plant metabolites, the alkaloids, may be constitutively synthesized in the plant or may be produced de novo in response to biotic or abiotic challenge. Although alkaloids can be synthesized in response to stresses such as wounding, they are also transiently produced in early stages of plant development (Cheong et al., 2002). In this case, specific alkaloid synthetic pathways may become active in rapidly dividing cells in apical regions of root tissue (De Luca and St Pierre, 2000). Beneficial Penicillium endophyte treatments elicited a variety of alterations in alkaloid biosynthetic pathways under well-watered and drought (water-limited) conditions. 2-piperidinecarboxylic acid (pipecolic acid), accumulates in plants in response to pathogen attack, and has been shown to accumulate in halotolerant species (Navarova et al., 2012, Moulin et al., 2006). Pipecolic acid, a degradation product of the amino acid lysine, is an intermediary of tropane alkaloid biosynthesis and was observed to accumulate differentially in leaf tissue of plants grown from seeds treated with beneficial Penicillium endophytes, when compared to non-inoculated control plants.

[0819] Flavonoid and isoflavonoids compounds are exuded by plant roots into the rhizosphere in response to nutrient stress in order to recruit compatible nitrogen-fixing bacteria. These signals are perceived by N-fixing rhizobia, which then begin production of nodulation factors that stimulate the development of nodules in the roots of the host plant (Gibson et al., 2008). Indeed, one study showed Rhizobium leguminosarum cells pretreated with plant-produced hesperetin stimulate increased nodulation in the host compared to bacteria that are not pretreated (Begum et al., 2001). In addition to playing a role in symbiosis development, these compounds may also function in pathogen response. Daidzein, in particular, accumulates in soybean plants in response to invasion by pathogenic Pseudomonas (Osman and Fett, 1982). Strain B treatments caused a relative decrease in daidzein in root and stem tissue of well-watered plants with a contrasting increase in leaf tissue. Additionally, beneficial Penicillium endophyte treatment induced the accumulation of hesperetin in stem tissue in the drought condition.

[0820] A variety of other metabolites were modulated by beneficial Penicillium endophyte treatment. For instance, a direct precursor to brassinosteroids, campesterol, was to reduced relative to control in leaf tissue of water-stressed plants treated with Strain B. Additionally, campesterol is increased relative to control in leaves of well-watered plants treated with Strain B. Brassinosteroid hormones are important in plant growth and development, as shown through the relatively high concentrations measured in reproductive and developing tissues (Khripach et al., 2000). Lumichrome, a degradation product of riboflavin, has been shown to be produced by root-associated Rhizobia. Lumichrome has the ability to affect plant root respiration, transpiration rates, as well as stomatal conductance in a variety agrinomically relevant plants (Phillips et al., 1999, Matiru and Dakora, 2005). In addition to production by members of the Rhizobia, it has been shown that soil microbes such as Pseudomonas can degrade riboflavin to lumichrome in rhizosphere systems (Yanagita and Foster, 1956). Further, lumichrome can promote plant growth, perhaps through its ability to stimulate increases in photosynthetic rates (Matiru and Dakora, 2005; Khan et al., 2008). In the current experiment, lumichrome levels remained unchanged or were reduced relative to control in well-watered plants. However under drought conditions there was an observed accumulation of lumichrome in various tissues, including stem (Strain B). As lumichrome affects stomatal conductance and photosynthetic rates, it is possible that it may provide a benefit to plants in both water deficit and excess water conditions. Allantoin, a product of urea metabolism, can constitute a large percentage of the soluble nitrogen in plant sap and may be integral in nitrogen transport in nodulated soybean plants (Reinbothe and Mothes, 1962; McClure and Israel, 1979). When a variety of legumes were examined for allantoin accumulation under water-deficit conditions and its associated effect on nitrogen-fixation, more drought tolerant genotypes were observed to maintain low levels of allantoin while drought-sensitive varieties tended to accumulate greater amounts of allantoin (Serraj et al., 1999). The reduction in allantoin in drought-tolerant varieties correlated with these plants' ability to fix nitrogen in the face of water deprivation. Further, laboratory and field experiments both show similar results, as ureides such as allantoin accumulate in soy plants, particularly in shoot tissue, under drought stress while N-fixation is inhibited (Sinclair and Serraj, 1995; Serraj et al., 1999). The beneficial Penicillium endophyte treatments tested caused increased accumulation of allantoin in stem tissue under normal conditions relative to control plants, while both also exhibited a reduction in allantoin when challenged with drought stress.

[0821] In addition to the specific compounds and pathways listed above, beneficial Penicillium endophyte treatments caused significant modulation in the levels of free amino acids and nitrogenous compounds under both watering regimes, suggesting microbe-mediated shifts in nitrogen metabolism. Strain B caused an elevation of many amino acids in leaf tissue while having more variable, but a generally depressive effect, on amino acid levels in stem tissue. Further, it stimulated the accumulation in stem tissue of nearly all amino acids detected and despite a general decrease in free amino acids detected in root tissues of plants treated with both microbes. Of particular note, certain amino acids including alanine, are found to accumulate in plant cells adapted to water stress (Handa et al., 1983). Under the conditions tested, relative increase in alanine levels occurred in stem tissue of drought-stressed plants grown from seeds treated with Strain B. In addition to alanine, Handa et al. (1983) describe drought-mediated increases in several other amino acids such as valine, histidine, serine, isoleucine, and leucine. Beneficial Penicillium endophyte variously modulated these amino acids in response to water stress in a seemingly tissue-specific manner. For example, Strain B was capable of inducing the accumulation of histidine, serine, leucine, and valine in leaf tissue of plants exposed to drought.

[0822] The metabolism of carbohydrates and lipids also shifted with Strain B treatment. Sucrose, for example, accumulated in both root and stem tissue of well-watered plants treated with Strain B, which may correspond to relative increases in photosynthetic carbon assimilation compared to control plants. Galactose was also shown to increase relative to controls in stem and leaf tissue of well-watered plants treated with Strain B. In the drought condition, both microbes displayed a generally depressive effect on relative carbohydrate levels, although in many cases there is little to no change observed. Fatty acids may serve as precursors to lipid-based hormones such as the jasmonates. These important signaling molecules fill developmental roles as well as contributing to the plant's protective arsenal where their synthesis may be stimulated by herbivory and exposure to pathogens or UV and wounding (Wasternack and Kombrink, 2009). Strain B treatment affected lipid metabolism as shown by modulation in the levels of a variety of fatty acids (hexadecanoic acid) as well as other precursors to lipid biosynthesis (ethanolamine, sphingosine).

### Example 12: Microbial Community Sequencing of Plants

### Methods

[0823] Cultivation-independent analysis of microbial taxa based on marker gene high-throughput sequencing was performed as follows.

[0824] Leaf and root tissue was obtained from soybean plants grown from seeds treated with beneficial and control Penicillium endophyte strains grown under water-stressed conditions (seed treatment and growth conditions described above). Whole leaves and roots were collected from 4 biological replicates per treatment. For each treatment and tissue, the biological replicates were processed independently. The roots were cleaned in successive water baths, with manual disaggregation and removal of larger pieces of material. Tissues were flash frozen in liquid nitrogen, then ground using a mortar and pestle treated with 95% ethanol and RNAse Away (Life Technologies, Inc., Grand Island, N.Y.) to remove contaminant RNA and DNA. DNA was extracted from the ground tissues using the DNeasy DNA extraction kit (Qiagen, Hilden, Germany) according to the manufacturer's instructions. Marker genes were amplified and sequenced from the extracted DNA. For the bacterial and archaeal analyses, the V4 hypervariable region of the 16S rRNA gene was targeted (primers 515f, 806r), and for fungi, the second internal transcribed spacer (ITS2) region of the rRNA operon (primers fITS7, ITS4) was targeted. The two marker genes were PCR amplified separately using 35 cycles, and staggered 9-bp barcoded primers specific to each sample were used to facilitate combining of samples. To reduce the amplification of chloroplast and mitochondrial DNA, PNA clamps specific to the rRNA genes in these organelles were used. PCR reactions to amplify 16S rRNA and ITS regions followed the protocol of Kozich et al. (2013) (Kozich, Westcott, Baxter, Highlander, & Schloss, 2013).

[0825] PCR products were cleaned with Agencourt AMPure XP beads at a 0.7:1 bead-to-library ratio (Beckman Coulter), quantified using the PicoGreen assay (Life Technologies, Inc., Grand Island, N.Y.) and pooled in equimolar concentrations. The final library was quantified by qPCR using the KAPA Library quantification kit (KAPA Biosystems) and diluted to 4 nM. In preparation for cluster generation and sequencing, pooled libraries were denatured with NaOH, diluted with hybridization buffer, and then heat denatured before MiSeq sequencing (Illumina). Each run included a minimum of 2.5% PhiX to serve as an internal control.

### OTU Assignment

[0826] For ITS2 sequences, the raw sequence data were reassigned to distinct samples based on barcode sequences introduced during library prep, and quality filtering and OTU (i.e. operational taxonomic unit) clustering was conducted using the UPARSE pipeline (Edgar 2013). Each endophyte was assigned to an Operational Taxonomic Unit (OTU). OTU clustering (Rideout et al, 2014) was performed using a cascading approach, comparing the sequences against the Greengenes (McDonald et al., 2012) and SILVA (Quast et al., 2013) and UNITE (Abarenkov et al., 2010) reference databases, which are provided with full-length clustering at various widths. Sequences were compared to the combined Greengenes 99% OTU representative sequences and SILVA non-redundant sequences. Sequences without a 99% match to the combined reference 99% OTUs but having a 97% match were assigned to 97% OTUs with the best match representative sequence from the 99% reference sequences. Fungal sequences were compared to the UNITE Dynamic OTU representative sequences, where dynamic represents values between 97% and 99% depending on the OTU. Sequences that did not match the UNITE Dynamic OTUs at the appropriate clustering level, but did have a 97% match were assigned to 97% OTUs with best match representative sequence from the Dynamic OTUs. The remaining sequences that did not match any of the three reference databases, Greengenes, SILVA, or UNITE, but were present at a level of at least 10 reads across the samples, were de novo clustered using UPARSE (independently for the bacterial and fungal sequences). Sequences that did not match a reference sequence were mapped to the de novo OTUs at 97%. Remaining sequences that did not match either a reference or de novo OTU were removed from this analysis.

### Identification of Differences Between Treatments

[0827] Only samples having at least 1000 reads after quality filtering were retained, and only OTUs with a mean relative abundance of 0.1% within a tissue/treatment were included in this analysis. Community differences at the genus and family level were computed by summing the relative abundance of OTUs by their taxonomic assignments at the genus and family levels across all biological replicates of the tissue/treatment using the phyloseq package in R (McMurdie and Holmes (2013)) (Figures CSGen1-4 and Figures CSFam1-4). For each tissue, we identified OTUs found in all biological replicates of beneficial microbial treatment and not in microbial treatments with negative or neutral affects or in untreated controls (Tables CSUOTU1-3). OTUs with significant differences in abundance between treatments/tissues were identified using the R package DESeq2 (Love et al. 2014). Raw read counts per OTU for biological replicates of different microbial treatments and untreated controls were used as inputs to DESeq2, the log 2 fold change and adjusted p-value of each contrast are included in Tables CSDE1-2 as are the average, normalized abundance of each OTU (as counts per million) in each treatment.

### Results

[0828] All results are summarized in Table 11.

[0829] In all treatments, Enterobacteriaceae was the most abundant family of bacteria in soybean leaves and Escherichia-Shigella the most abundant bacterial genera. Seeds treated with Penicillium sp. reduced the average abundance of members of the Enterobacteriaceae family and the Escherichia-Shigella genera.

[0830] Plants grown from seeds treated with Penicillium demonstrated reduced average abundance of members of the Enterobacteriaceae family and the Escherichia-Shigella genera.

[0831] Seed treatment with Strain B increased the abundance of the arbuscular mycorrhizal (AM) fungi in roots of plants grown from said seeds. The family Glomeraceae was enriched in root tissue of plants grown from seeds treated with Strain B, and showed an increase in average abundance of 55% relative to untreated controls and an increase of 70% relative to Strain F. Glomeraceae contains several genera of AM fungi including Rhizophagus and Glomus.

[0832] The communities of plants grown from seeds treated with Strain B were enriched in OTUs belonging to the genus Rhizophagus, as compared to plants grown from seeds treated with Strain F or formulation control. On average, the members of the genus Rhizophagus made up more than 30% of the total fungal communities in samples of plants grown from seeds treated with Strain B, a 214% increase over the average abundance in untreated samples and 211% increase over the average abundance in samples of plants grown from seeds treated with Strain F. The Rhizophagus OTU F1.0|SYM97_ITS2|1601 was found within all biological replicates of soybean roots of plants grown from seeds treated with Strain B, but not in in samples of plants grown from seeds treated with Strain F or formulation control. The Rhizophagus OTUs F1.0|SYM97_ITS2|11548 and F1.0|SYM97_ITS2|1518 were significantly differentially abundant between Strain B treatment and the untreated control plants.

[0833] F1.0|SYM97_ITS2|1548 was also differentially abundant in samples of plants grown from seeds treated with Strain B.

### Example 13: Field Trials

[0834] Seeds from soybean were treated with Strain B as well as the formulation control as described in Example 4. Seeds were sown in at leaste two different growing regions for efficacy testing. Trials consisted of ten replicate plots for each treatment and control respectively arranged in a spatially balanced randomized complete block design (Van Es et al. 2007). The plot area was well-maintained and kept weed-, insect- and disease-free In addition to measuring total yield, metrics such as seedling emergence, normalized difference vegetation index (NDVI) and time to flowering were assessed. Trials were conducted during non-irrigated conditions.

[0835] All results are shown in Table 12.

[0836] Soybean trials under were conducted at one location using two soybean varieties in the Midwest region of the United States during 2015. Field conditions during the trial were particularly wet: field conditions did not constitute drought or water-limited conditions even though they were non-irrigated. No negative impacts on any measured variable was seen for plants grown from seeds treated with Strain B as compared to plants grown from seeds treated with the formulation control only. Parity was achieved for yield (bushels per acre), percent moisture (% per plot), and seed weight (pounds per bushel). No yield drag was observed under normal watering conditions.

[0837] Maize trials were conducted at two different locations using two soybean varieties in South America during 2015. Field conditions during the trial were particularly wet: field conditions did not constitute drought or water-limited conditions even though they were non-irrigated. No negative impacts on any measured variable was seen for plants grown from seeds treated with Strain B as compared to plants grown from seeds treated with the formulation control only. Parity was achieved for combine percent moisture, and combine test weight.

[0838] Having illustrated and described the principles of the present invention, it should be apparent to persons skilled in the art that the invention can be modified in arrangement and detail without departing from such principles. We claim all modifications that are within the spirit and scope of the appended claims. All publications and published patent documents cited in this specification are incorporated herein by reference to the same extent as if each individual publication or patent application is specifically and individually indicated to be incorporated herein by reference. It is to be understood that while the invention has been described in conjunction with the detailed description thereof, the foregoing description is intended to illustrate and not limit the scope of the invention, which is defined by the scope of the appended claims. Other aspects, advantages, and modifications are within the scope of the following claims.

TABLE 1
Selected sequences of the present invention

| SEQ | | | | | | | | |
|---|---|---|---|---|---|---|---|---|
| ID | | | | | | | | |
| NO: | Kingdom | Phylum | Class | Order | Family | Genus | Species | Sequence |
| 1 | Fungi | Ascomy- | Euroto | Euro- | Tricho- | Peni- | | ATTACCGAGTGAGGGCCCTTTGGGTCCAACCTCCCACCCGTGTTTATTTTACCTTGTTGCTTCGGCGGGCCCGCCTTT |
| | | cota | Eurotio- | tiales | comaceae | cillium | | ACTGGCCGCCGGGGGGCTTCACGCCCCCGGGCCCGCGCCCGCCGAAGACACCCTCGAACTCTGTCTGAAGATTGAAGT |
| | | | mycetes | | | | | CTGAGTGAAAATATAAATTATTTAAAACTTTCAACAACGGATCTCTTGGTTCCGGCATCGATGAAGAACGCAGCGAAA |
| | | | | | | | | TGCGATACGTAATGTGAATTGCAAATTCAGTGAATCATCGAGTCTTTGAACGCACATTGCGCCCCCTGGTATTCCGGG |
| | | | | | | | | GGGCATGCCTGTCCGAGCGTCATTGCTGCCCTCAAGCCCGGCTTGTGTGTTGGGCCCCGTCCTCCGATTCCGGGGGAC |
| | | | | | | | | GGGCCCGAAAGGCAGCGGCGGCACCGCGTCCGGTCCTCGAGCGTATGGGGCTTTGTCACCCGCTCCGTAGGCCCGGCC |
| | | | | | | | | GGCGCTTGCCGATCAACCCAAATTTTTATCCAGGTTGACCTCGGATCAGGTAGGGATACCCGCTGAACTTAAGC |
| 2 | Fungi | Ascomy- | Euroto | Euro- | Tricho- | Peni- | Strain B | GTGAACCTGCGGAAGGATCATTACCGAGTGAGGGCCCTCTGGGTCCAACCTCCCACCCGTGTTTATTTTACCTTGTTGCTT |
| | | cota | Eurotio- | tiales | comaceae | cillium | | CGGCGGGCCCGCCTTAACTGGCCGCCGGGGGGCTTACGCCCCCGGGCCCGCGCCCGCCGAAGACACCCTCGAACTCTGTCT |
| | | | mycetes | | | | | GAAGATTGTAGTCTGAGTGAAAATATAAATTATTTAAAACTTTCAACAACGGATCTCTTGGTTCCGGCATCGATGAAGAAC |
| | | | | | | | | GCAGCGAAATGCGATACGTAATGTGAATTGCAAATTCAGTGAATCATCGAGTCTTTGAACGCACATTGCGCCCCCTGGTAT |
| | | | | | | | | TCCGGGGGGCATGCCTGTCCGAGCGTCATTGCTGCCCTCAAGCACGGCTTGTGTGTTGGGCCCCGTCCTCCGATCCCGGGG |
| | | | | | | | | GACGGGCCCGAAAGGCAGCGGCGGCACCGCGTCCGGTCCTCGAGCGTATGGGGCTTTGTCACCCGCTCTGTAGGCCCGGCC |
| | | | | | | | | GGCGCTTGCCGATCAACCCAAATTTTTATCCAGGTTGACCTCGGATCAGGTAGGGATACCCGCTGAACTTAAGCATAT |
| 3 | Fungi | Ascomy- | Euroto | Euro- | Tricho- | Peni- | chryso- | CGCCCTATCCTAGTTTCTCGGTTATTTCTAGGTCTCTATAGACCTCTATCGTCTCTCTAGCGATACCGCCTAGACTCT |
| | | cota | Eurotio- | tiales | comaceae | cillium | genum | CTCGCCGAGTCCTAGCTCTTAGCGCG |
| | | | mycetes | | | | | |
| 4 | Fungi | Ascomy- | Euroto | Euro- | Tricho- | Peni- | olsonii | AGGTGACCTGCGGAAGGATCATTACCGAGTGAGGGCCCTCTGGGTCCAACCTCCCACCCGTGTTTATTTTACCTTGTTGCT |
| | | cota | Eurotio- | tiales | comaceae | cillium | | TCGGCGAGCCTGCCTTCGGGCTGCCGGGGGGCATCTGCCCCCGGGTCCGCGCTCGCCGGAGACACCTTGAACTCTGTCTGA |
| | | | mycetes | | | | | AGATTGTAGTCTGAGACAAAATATAAATTATTTAAAACTTTCAACAACGGATCTCTTGGTTCCGGCATCGATGAAGAACGC |
| | | | | | | | | AGCGAAATGCGATACGTAATGTGAATTGCAGAATTCAGTGAATCATCGAGTCTTTGAACGCACATTGCGCCCTCTGGTATT |
| | | | | | | | | CCGGAGGGCATGCCTGTCCGAGCGTCATTGCTGCCCTCAAGCACGGCTTGTGTGTTGGGCTCCGTCCTCCTTCTGGGGGGA |
| | | | | | | | | CGGGCCCGAAAGGCAGCGGCGGCACCGCGTCCGGTCCTCGAGCGTATGGGGCTTTGTCACCCGCTCTGTAGGACTGGCCGG |
| | | | | | | | | CGCCTGCCGATCAACCAAACTTTTTTCCAGGTTGACCTCGGATCAGGTAGGGATACCCGCTGAACTTAAGCATATCAATAA |
| | | | | | | | | GCGGAGGAA |
| 5 | Fungi | Ascomy- | Euroto | Euro- | Tricho- | Peni- | griseo- | ATTACTGAGTGAGGGCCCTCTGGGTCCAACCTCCCACCCGTGTTTATTTACCTTGTTGCTTCGGCGGGCCCGCCTTAA |
| | | cota | Eurotio- | tiales | comaceae | cillium | fulvum | CTGGCCGCCGGGGGGCTTACGCCCCCGGGCCCGCGCCCGCCGAAGACACCCTCGAACTCTGTCTGAAGATTGTAGTCT |
| | | | mycetes | | | | | GAGTGAAAATATAAATTATTTAAAACTTTCAACAACGGATCTCTTGGTTCCGGCATCGATGAAGAACGCAGCGAAATG |
| | | | | | | | | CGATACGTAATGTGAATTGCAAATTCAGTGAATCATCGAGTCTTTGAACGCACATTGCGCCCCCTGGTATTCCGGGGG |
| | | | | | | | | GCATGCCTGTCCGAGCGTCATTGCTGCCCTCAAGCACGGCTTGTGTGTTGGGCCCCGTCCTCCGATTCCGGGGGACGG |
| | | | | | | | | GCCCGAAAGGCAGCGGCGGCACCGCGTCCGGTCCTCGAGCGTATGGGGCTTTGTCACCCGCTCTGTAGGCCCGGCCGG |
| | | | | | | | | CGCTTGCCGATCAACCCAAATTTTTATCCAGGTTGACCTCGGATCAGGTAGGGATACCCGCTGAACTTAAGCA |
| 6 | Fungi | Ascomy- | Euroto | Euro- | Tricho- | Peni- | janthi- | GACCTGCGGAAGGATCATTACCGAGTGAGGGCCCTCTGGGTCCAACCTCCCACCCGTGTTTATCATACCTAGTTGCTT |
| | | cota | Eurotio- | tiales | comaceae | cillium | nellum | CGGCGGGCCCGCCGTCATGGCCGCCGGGGGGCATCCGCCCCCGGGCCCGCGCCCGCCGAAGCCCCCCCTGAACGCTGT |
| | | | mycetes | | | | | CTGAAGATTGCAGTCTGAGCGATTAGCTAAATCAGTTAAAACTTTCAACAACGGATCTCTTGGTTCCGGCATCGATGA |
| | | | | | | | | AGAACGCAGCGAAATGCGATAAGTAATGTGAATTGCAGAATTCAGTGAATCATCGAGTCTTTGAACGCACATTGCGCC |
| | | | | | | | | CCCTGGTATTCCGGGGGGCATGCCTGTCCGAGCGTCATTGCTGCCCTCAAGCACGGCTTGTGTGTTGGGCCCCCGCCC |
| | | | | | | | | CCCGGCTCCCGGGGGGCGGGCCCGAAAGGCAGCGGCGGCACCGCGTCCGGTCCTCGAGCGTATGGGGCTTCGTCACCC |
| | | | | | | | | GCTCTGTAGGCCCGGCCGGCGCCCGCCGGCGACCCCCCTCAATCTTTCTCAGGTTGACCTCGGATCAGGTAGGGATAC |
| | | | | | | | | CCGCTGAACTTAAGCATATCAATAAGCGGAGGAA |
| 7 | Fungi | Ascomy- | Euroto | Euro- | Tricho- | Peni- | | CATTACCGAGTGAGGGCCCTCTGGGTCCAACCTCCCACCCGTGTTTATTTTACCTTGTTGCTTCGGCGGGCCCGCCTT |
| | | cota | Eurotio- | tiales | comaceae | cillium | | TACAGGCCGCCGGGGGGCTCACGCCCCCGGGCCCGCGCCCGCCGAAGACACCCTCGAACTCTGTCTGAAGATTGAAGT |
| | | | mycetes | | | | | CTGAGTGAAAATATAAATTATTTAAAACTTTCAACAACGGATCTCTTGGTTCCGGCATCGATGAAGAACGCAGCGAAA |
| | | | | | | | | TGCGATACGTAATGTGAATTGCAAATTCAGTGAATCATCGAGTCTTTGAACGCACATTGCGCCCCCTGGTATTCCGGG |
| | | | | | | | | GGGCATGCCTGTCCGAGCGTCATTGCTGCCCTCAAGCCCGGCTTGTGTGTTGGGCCCCGTCCTCCGATTTCCGGGGGA |
| | | | | | | | | CGGGCCCGAAAGGCAGCGGCGGCACCGCGTCCGGTCCTCGAGCGTATGGGGCTTTGTCACCCGCTCTGTAGGCCCGGC |
| | | | | | | | | CGGCGCTTGCCGATCAACCCAAATTTTTATCCAGGTTGACCTCGGATCAGGTAGGGATACCCGCTGAACTTAAGC |
| 8 | | | | | | | | CTTGGTCATTTAGAGGAAGTAA |
| 9 | | | | | | | | TCCTCCGCTTATTGATATGC |
| 10 | | | | | | | | AGCGGCCTCTATAATCCGGTA |
| 11 | | | | | | | | AGATATCGCTATCCGCGAAC |

TABLE 2
Auxin, acetoin, and siderophore production by the beneficial Penicillium
endophyte Strain B

| | auxin | | acetoin | | siderophore | |
|---|---|---|---|---|---|---|
| | Average | SE | Average | SE | Average | SE |
| (+) Control | 0.0825 | 0.0022 | 3.8513 | 0.0848 | 0.2450 | 0.0956 |
| Strain B | 0.0283 | 0.0009 | 0.0303 | 0.0013 | 0.2373 | 0.0976 |

TABLE 3
Biolog Assay Data
Utilization of sole carbon sources by fungal strain
Strain B using BIOLOG Phenotype MicroArray 1,
as recorded at 72 hours post-inoculation.

| Substrate | Strain B |
|---|---|
| Negative control | N/A |
| L-Arabinose | + |
| L-Proline | + |
| D-Xylose | + |
| L-Glutamic acid | + |
| D-Ribose | + |
| L-Asparagine | + |
| Sucrose | + |
| Tween 80 | + |
| Adonitol | + |
| L-Alanine | + |
| L-Alanyl-Glycine | + |
| L-Galactonic-acid-γ-lactone | + |
| β-Methyl-D-glucoside | + |
| m-Inositol | + |
| D-Galactose | + |
| D-Trehalose | + |
| D-Glucuronic acid | + |
| D-Gluconic acid | + |
| D-Mannitol | + |
| D-L-Malic acid | + |
| α-D-Glucose | + |
| Maltose | + |
| D-Melibiose | + |
| Maltotriose | + |
| Pyruvic acid | + |
| D-Galacturonic acid | + |
| D-Mannose | + |
| L-Threonine | + |
| Inosine | + |
| L-Lyxose | + |
| D-Alanine | + |
| L-Lactic acid | + |
| D-Galactonic acid-γ-lactone | + |
| Uridine | + |
| α-Hydroxy Glutaric acid-γ-lactone | + |
| D-L-α-Glycerol phosphate | + |
| D-Saccharic acid | − |
| Glycerol | − |
| Tween 20 | − |
| Tween 40 | − |
| L-glutamine | − |
| Glycyl-L-Aspartic acid | − |
| Fumaric acid | − |
| Glycyl-L-Glutamic acid | − |
| L-Serine | − |
| Glycyl-L-Proline | − |
| Citric acid | − |
| D-Malic acid | − |
| N-Acetyl-D-Glucosamine | − |
| Succinic acid | − |
| D-Sorbitol | − |
| D-Fructose | − |
| α-D-Lactose | − |
| Lactulose | − |
| Methyl Pyruvate | − |
| Dulcitol | − |
| L-Rhamnose | − |
| α-Methyl-D-Galactoside | − |
| m-Tartaric acid | − |
| D-Cellobiose | − |
| Mono Methyl Succinate | − |
| Adenosine | − |
| Bromo succinic acid | − |
| 2-Aminoethanol | − |
| p-Hydroxy Phenyl acetic acid | − |
| Phenylethyl-amine | − |
| L-Malic acid | − |
| L-Aspartic acid | − |
| Glyoxylic acid | − |
| L-Fucose | − |
| 1,2-Propanediol | − |
| D-Psicose | − |
| Acetic acid | − |
| Propionic acid | − |
| D-Glucosaminic acid | − |
| α-Keto-Glutaric acid | − |
| D-Glucose-1-Phosphate | − |
| 2-Deoxy adenosine | − |
| D-Threonine | − |
| Mucic acid | − |
| Glycolic acid | − |
| Tyramine | − |
| D-Serine | − |
| Formic acid | − |
| D-Glucose-6-Phosphate | − |
| Thymidine | − |
| D-Aspartic acid | − |
| α-Keto-Butyric acid | − |
| D-Fructose-6-Phosphate | − |
| α-Hydroxy Butyric acid | − |
| Tricarballylic acid | − |
| Acetoacetic acid | − |
| N-acetyl-β-D-Mannosamine | − |
| m-Hydroxy Phenyl Acetic acid | − |
| Glucuronamide | − |

### Table 4: Proteomics Analysis of Penicillium Culture Secretome

TABLE 4A
Proteins expressed in the culture of the Penicillium strain Strain B but not in that of the Penicillium strain Strain
F. Results are shown by KEGG pathway, by Gene Ontology (GO) description, means of levels for each strain (normalized spectra counts),
and the fold-change computed as log₂ StrainB/StrainF spectra count (normalized spectra counts of StrainB/StrainF).

| | | | Strain | Strain | |
|---|---|---|---|---|---|
| | | | B | F | Fold- |
| SEQID | KEGG | GO | mean | mean | change |
| 67 | E3.—.—.—, LCMT1 | acetylxylan esterase activity, cellulose catabolic process, extracellular | 0.031 | 0.000 | 5.0 |
| | | region, hydrolase activity, methylation, methyltransferase activity, | | | |
| | | xylan catabolic process | | | |
| 42 | Alzheimer's disease, ATPeF1B, ATP5B, | ADP binding, ATP binding, ATP hydrolysis coupled proton transport, | 0.056 | 0.000 | 5.8 |
| | ATP2, Huntington's disease, Oxidative | ATP synthesis coupled proton transport, mitochondrial ATP synthesis | | | |
| | phosphorylation, Parkinson's disease | coupled proton transport, mitochondrial proton-transporting ATP | | | |
| | | synthase, catalytic core, proton-transporting ATP synthase activity, | | | |
| | | rotational mechanism, proton-transporting ATP synthase complex, | | | |
| | | catalytic core F(1), proton-transporting ATPase activity, rotational | | | |
| | | mechanism | | | |
| 33 | None | anchored component of membrane, carbohydrate metabolic process, | 0.997 | 0.000 | 10.0 |
| | | plasma membrane, transferase activity | | | |
| 15 | E3.2.1.89 | arabinogalactan endo-1,4-beta-galactosidase activity, carbohydrate | 0.552 | 0.000 | 9.1 |
| | | metabolic process, glucosidase activity | | | |
| 47 | Aminoacyl-tRNA biosynthesis, Ribosome, | aspartic-type endopeptidase activity, ATP binding, methylation, | 0.051 | 0.000 | 5.7 |
| | RP-S10, MRPS10, rpsJ, WARS, trpS | methyltransferase activity, nucleic acid binding, proteolysis, ribosome, | | | |
| | | structural constituent of ribosome, tryptophan-tRNA ligase activity, | | | |
| | | tryptophanyl-tRNA aminoacylation | | | |
| 38 | None | carbohydrate binding, carbohydrate metabolic process, hydrolase | 0.312 | 0.000 | 8.3 |
| | | activity, hydrolyzing O-glycosyl compounds, integral component of | | | |
| | | membrane | | | |
| 75 | E3.2.1.— | carbohydrate metabolic process, cell wall macromolecule catabolic | 1.331 | 0.000 | 10.4 |
| | | process, lysozyme activity, peptidoglycan catabolic process | | | |
| 60 | GBA, srfJ, Lysosome, Other glycan | carbohydrate metabolic process, glucan endo-1,6-beta-glucosidase | 0.053 | 0.000 | 5.8 |
| | degradation, Sphingolipid metabolism | activity, glucosylceramidase activity, sphingolipid metabolic process | | | |
| 61 | E3.2.1.— | cellulose 1,4-beta-cellobiosidase activity, cellulose binding, cellulose | 0.066 | 0.000 | 6.1 |
| | | catabolic process, extracellular region, hydrolase activity, hydrolyzing | | | |
| | | O-glycosyl compounds | | | |
| 34 | E3.2.1.3, Starch and sucrose metabolism | glucan 1,4-alpha-glucosidase activity, polysaccharide catabolic process, | 0.174 | 0.000 | 7.5 |
| | | starch binding | | | |
| 28 | E3.2.1.3, Starch and sucrose metabolism | glucan 1,4-alpha-glucosidase activity, polysaccharide metabolic process | 4.965 | 0.000 | 12.3 |
| 58 | None | nutrient reservoir activity, regulation of transcription, DNA-templated, | 0.101 | 0.000 | 6.7 |
| | | sequence-specific DNA binding, transcription factor activity, sequence- | | | |
| | | specific DNA binding | | | |

TABLE 4B
Proteins not expressed in the culture of the Penicillium strain Strain B but were expressed in that of the Penicillium strain
Strain F. Results are shown by KEGG pathway, by Gene Ontology (GO) description, means of levels for each strain (normalized spectra counts),
and the fold-change computed as log₂ StrainB/StrainF spectra count (normalized spectra counts of StrainB/StrainF).

| | | | Strain | Strain | |
|---|---|---|---|---|---|
| | | | B | F | Fold- |
| SEQID | KEGG | GO | mean | mean | change |
| 72 | None | (1−>3)-beta-D-glucan metabolic process, 1,3-beta- | 0.000 | 1.287 | −10.3 |
| | | glucanosyltransferase activity, anchored component of | | | |
| | | membrane, carbohydrate metabolic process, fungal-type cell | | | |
| | | wall, hydrolase activity, integral component of membrane, | | | |
| | | plasma membrane, transferase activity | | | |
| 57 | E3.1.3.8, Inositol phosphate metabolism | acid phosphatase activity, dephosphorylation | 0.000 | 0.078 | −6.3 |
| 27 | Cysteine and methionine metabolism, E3.3.1.1, | adenosylhomocysteinase activity, one-carbon metabolic | 0.000 | 0.183 | −7.5 |
| | ahcY | process | | | |
| 48 | Carbohydrate digestion and absorption, E3.2.1.1, | alpha-amylase activity, calcium ion binding, carbohydrate | 0.000 | 0.195 | −7.6 |
| | amyA, malS, Starch and sucrose metabolism | catabolic process, carbohydrate metabolic process, hydrolase | | | |
| | | activity, hydrolyzing O-glycosyl compounds | | | |
| 18 | E3.2.1.22B, galA, rafA, Galactose metabolism, | alpha-galactosidase activity, carbohydrate metabolic process, | 0.000 | 0.078 | −6.3 |
| | Glycerolipid metabolism, Glycosphingolipid | extracellular region, polysaccharide catabolic process, raffinose | | | |
| | biosynthesis - globo series, Sphingolipid metabolism | alpha-galactosidase activity | | | |
| 55 | APE2 | amino acid transmembrane transport, amino acid | 0.000 | 0.428 | −8.7 |
| | | transmembrane transporter activity, aminopeptidase activity, | | | |
| | | integral component of membrane, metallopeptidase activity, | | | |
| | | proteolysis, zinc ion binding | | | |
| 36 | PEPD | aminopeptidase activity, manganese ion binding, | 0.000 | 0.578 | −9.2 |
| | | metallopeptidase activity, proteolysis | | | |
| 73 | pepP | aminopeptidase activity, metal ion binding, metallopeptidase | 0.000 | 0.170 | −7.4 |
| | | activity, proteolysis | | | |
| 45 | None | anchored component of membrane, carbohydrate metabolic | 0.000 | 0.561 | −9.1 |
| | | process, hydrolase activity, plasma membrane, transferase | | | |
| | | activity | | | |
| 32 | Amino sugar and nucleotide sugar metabolism, | ATP binding, carbohydrate phosphorylation, cell, cellular | 0.000 | 0.389 | −8.6 |
| | Butirosin and neomycin biosynthesis, Carbohydrate | glucose homeostasis, glucose binding, glycolytic process, | | | |
| | digestion and absorption, Carbon metabolism, | hexokinase activity | | | |
| | Central carbon metabolism in cancer, Fructose and | | | | |
| | mannose metabolism, Galactose metabolism, | | | | |
| | Glycolysis/Gluconeogenesis, HIF-1 signaling | | | | |
| | pathway, HK, Insulin signaling pathway, Starch and | | | | |
| | sucrose metabolism, Streptomycin biosynthesis, | | | | |
| | Type II diabetes mellitus | | | | |
| 70 | None | ATP binding, helicase activity, nucleic acid binding, proteolysis, | 0.000 | 0.021 | −4.4 |
| | | serine-type peptidase activity | | | |
| 30 | bglX, Cyanoamino acid metabolism, | beta-glucosidase activity, cellulose catabolic process | 0.000 | 0.219 | −7.8 |
| | Phenylpropanoid biosynthesis, Starch and sucrose | | | | |
| | metabolism | | | | |
| 14 | 2-Oxocarboxylic acid metabolism, Alanine, | biosynthetic process, cellular amino acid metabolic process, L- | 0.000 | 0.301 | −8.2 |
| | aspartate and glutamate metabolism, Arginine and | aspartate: 2-oxoglutarate aminotransferase activity, L- | | | |
| | proline metabolism, Biosynthesis of amino acids, | phenylalanine: 2-oxoglutarate aminotransferase activity, | | | |
| | Carbon fixation in photosynthetic organisms, | pyridoxal phosphate binding, transaminase activity | | | |
| | Carbon metabolism, Cysteine and methionine | | | | |
| | metabolism, GOT1, Isoquinoline alkaloid | | | | |
| | biosynthesis, Phenylalanine metabolism, | | | | |
| | Phenylalanine, tyrosine and tryptophan | | | | |
| | biosynthesis, Tropane, piperidine and pyridine | | | | |
| | alkaloid biosynthesis, Tyrosine metabolism | | | | |
| 53 | MAN1, N-Glycan biosynthesis, Protein processing | calcium ion binding, extracellular region, mannosyl- | 0.000 | 2.382 | −11.2 |
| | in endoplasmic reticulum, Various types of | oligosaccharide 1,2-alpha-mannosidase activity, membrane, | | | |
| | N-glycan biosynthesis | metabolic process, protein glycosylation | | | |
| 77 | E3.2.1.— | carbohydrate binding, carbohydrate metabolic process, cell | 0.000 | 2.037 | −11.0 |
| | | wall, cell wall organization, DNA binding, hydrolase activity, | | | |
| | | hydrolyzing O-glycosyl compounds, nucleus, transcription, | | | |
| | | DNA-templated, transferase activity, zinc ion binding | | | |
| 29 | None | carbohydrate binding, carbohydrate metabolic process, | 0.000 | 0.032 | −5.0 |
| | | endoribonuclease activity, hydrolase activity, hydrolyzing O- | | | |
| | | glycosyl compounds, integral component of membrane, RNA | | | |
| | | phosphodiester bond hydrolysis, endonucleolytic, rRNA | | | |
| | | transcription | | | |
| 40 | None | carbohydrate binding, carbohydrate metabolic process, | 0.000 | 0.730 | −9.5 |
| | | hydrolase activity | | | |
| 37 | None | carbohydrate binding, carbohydrate metabolic process, | 0.000 | 0.047 | −5.6 |
| | | hydrolase activity | | | |
| 43 | Galactose metabolism, malZ, Starch and sucrose | carbohydrate binding, carbohydrate metabolic process, | 0.000 | 0.360 | −8.5 |
| | metabolism | hydrolase activity, hydrolyzing O-glycosyl compounds | | | |
| 56 | E5.1.3.15, Glycolysis/Gluconeogenesis | carbohydrate binding, carbohydrate metabolic process, | 0.000 | 0.208 | −7.7 |
| | | hydrolase activity, isomerase activity | | | |
| 76 | Galactose metabolism, galM, GALM, Glycolysis/ | carbohydrate binding, carbohydrate metabolic process, | 0.000 | 0.174 | −7.5 |
| | Gluconeogenesis | isomerase activity | | | |
| 39 | None | carbohydrate metabolic process, hydrolase activity, hydrolyzing | 0.000 | 0.287 | −8.2 |
| | | O-glycosyl compounds | | | |
| 62 | None | catalytic activity, hydrolase activity, acting on glycosyl bonds, | 0.000 | 0.282 | −8.1 |
| | | metabolic process | | | |
| 52 | Glutathione metabolism, GSR, gor, Thyroid | cell, cell redox homeostasis, flavin adenine dinucleotide | 0.000 | 0.239 | −7.9 |
| | hormone synthesis | binding, glutathione metabolic process, glutathione-disulfide | | | |
| | | reductase activity, NADP binding, oxidation-reduction process | | | |
| 54 | msrA Methionine sulfoxide reductase | cellular response to hydrogen peroxide, cytosol, L-methionine | 0.000 | 0.291 | −8.2 |
| | | biosynthetic process from methionine sulphoxide, L- | | | |
| | | methionine-(S)-S-oxide reductase activity, nucleus, oxidation- | | | |
| | | reduction process, peptide-methionine (S)-S-oxide reductase | | | |
| | | activity, protein repair, response to oxidative stress | | | |
| 16 | EEF1A, Legionellosis, RNA transport | cytoplasm, GTP binding, GTPase activity, translation elongation | 0.000 | 0.104 | −6.7 |
| | | factor activity, translation initiation factor activity, translational | | | |
| | | elongation, translational initiation | | | |
| 63 | ARHGDI, RHOGDI, Neurotrophin signaling | cytoplasm, regulation of catalytic activity, Rho GDP-dissociation | 0.000 | 0.201 | −7.7 |
| | pathway, Vasopressin-regulated water reabsorption | inhibitor activity | | | |
| 20 | Alzheimer's disease, Amyotrophic lateral sclerosis | cytosol, electron carrier activity, heme binding, metal ion | 0.000 | 1.256 | −10.3 |
| | (ALS), Apoptosis, Colorectal cancer, CYC, | binding, mitochondrial ATP synthesis coupled electron | | | |
| | Hepatitis B, Herpes simplex infection, | transport, mitochondrion, nucleus, oxidation-reduction | | | |
| | Huntington's disease, Influenza A, Legionellosis, | process, respiratory chain | | | |
| | Non-alcoholic fatty liver | | | | |
| | disease (NAFLD), p53 signaling pathway, | | | | |
| | Parkinson's disease, Pathways in cancer, Small | | | | |
| | cell lung cancer, Sulfur metabolism, | | | | |
| | Toxoplasmosis, Tuberculosis, Two-component | | | | |
| | system, Viral myocarditis | | | | |
| 44 | None | dephosphorylation, phosphatase activity | 0.000 | 0.138 | −7.1 |
| 21 | ECE | FMN binding, integral component of membrane, | 0.000 | 0.082 | −6.4 |
| | | metalloendopeptidase activity, oxidation-reduction process, | | | |
| | | oxidoreductase activity, proteolysis | | | |
| 51 | Ether lipid metabolism, Glycerophospholipid | hydrolase activity, acting on ester bonds, metabolic process | 0.000 | 0.745 | −9.5 |
| | metabolism, Inositol phosphate metabolism, plcC, | | | | |
| | Thyroid hormone signaling pathway | | | | |
| 66 | None | hydrolase activity, metabolic process | 0.000 | 0.829 | −9.7 |
| 35 | None | hydrolase activity, metabolic process | 0.000 | 0.012 | −3.7 |
| 64 | None | integral component of membrane | 0.000 | 2.459 | −11.3 |
| 71 | Betalain biosynthesis, Isoquinoline alkaloid | integral component of membrane, metal ion binding, oxidation- | 0.000 | 0.263 | −8.0 |
| | biosynthesis, Melanogenesis, Riboflavin | reduction process, oxidoreductase activity | | | |
| | metabolism, TYR, Tyrosine metabolism | | | | |
| 68 | E3.2.1.58, Starch and sucrose metabolism | lyase activity, metabolic process | 0.000 | 0.145 | −7.2 |
| 69 | E3.2.1.58, Starch and sucrose metabolism | lyase activity, metabolic process | 0.000 | 0.114 | −6.8 |
| 46 | AGXT, Alanine, aspartate and glutamate | metabolic process, transaminase activity | 0.000 | 0.171 | −7.4 |
| | metabolism, Carbon metabolism, Glycine, serine | | | | |
| | and threonine metabolism, Glyoxylate and | | | | |
| | dicarboxylate metabolism, Methane metabolism, | | | | |
| | Peroxisome | | | | |
| 25 | None | mitochondrion, oxidation-reduction process, oxidoreductase | 0.000 | 0.531 | −9.1 |
| | | activity | | | |
| 23 | Cysteine and methionine metabolism, E2.4.2.28, | nucleoside metabolic process, S-methyl-5-thioadenosine | 0.000 | 0.076 | −6.3 |
| | mtaP | phosphorylase activity | | | |
| 17 | Biosynthesis of amino acids, Carbon fixation in | pentose-phosphate shunt, non-oxidative branch, ribose-5- | 0.000 | 0.264 | −8.0 |
| | photosynthetic organisms, Carbon metabolism, | phosphate isomerase activity | | | |
| | Pentose phosphate pathway, rpiA | | | | |

TABLE 4C
Proteins expressed in the culture of the Penicillium strain Strain B at a higher level than were expressed in the culture of the Penicillium
strain Strain F. Results are shown by KEGG pathway, by Gene Ontology (GO) description, means of levels for each strain (normalized spectra counts),
and the fold-change computed as log₂ StrainB/StrainF spectra count (normalized spectra counts of StrainB/StrainF).

| | | | Strain | Strain | |
|---|---|---|---|---|---|
| | | | B | F | Fold- |
| SEQID | KEGG | GO | mean | mean | change |
| 12 | None | flavin adenine dinucleotide binding, integral component of membrane, | 0.201 | 0.012 | 3.9 |
| | | oxidation-reduction process, oxidoreductase activity, acting on CH—OH | | | |
| | | group of donors | | | |
| 13 | None | flavin adenine dinucleotide binding, oxidation-reduction process, | 0.685 | 0.117 | 2.5 |
| | | oxidoreductase activity, acting on CH—OH group of donors | | | |
| 19 | None | carbohydrate binding, carbohydrate metabolic process, cell wall, cell wall | 0.634 | 0.048 | 3.7 |
| | | organization, hydrolase activity, hydrolyzing O-glycosyl compounds, | | | |
| | | integral component of membrane, transferase activity | | | |
| 22 | E3.2.1.4, Starch and sucrose metabolism | carbohydrate metabolic process, cellulose binding, extracellular region, | 0.881 | 0.170 | 2.4 |
| | | hydrolase activity, hydrolyzing O-glycosyl compounds | | | |
| 24 | None | flavin adenine dinucleotide binding, oxidation-reduction process, | 1.442 | 0.122 | 3.5 |
| | | oxidoreductase activity, acting on CH—OH group of donors, UDP-N- | | | |
| | | acetylmuramate dehydrogenase activity | | | |
| 26 | E3.4.23.— | aspartic-type endopeptidase activity, carbohydrate binding, extracellular | 6.126 | 0.183 | 5.1 |
| | | region, proteolysis, zymogen activation | | | |
| 49 | E3.4.23.18 | aspartic-type endopeptidase activity, extracellular region, pathogenesis, | 5.499 | 0.303 | 4.2 |
| | | proteolysis | | | |
| 50 | Amino sugar and nucleotide sugar | chitosanase activity, extracellular region, polysaccharide catabolic process | 8.011 | 0.511 | 4.0 |
| | metabolism, csn | | | | |
| 59 | None | carbohydrate binding, carbohydrate metabolic process, hydrolase activity, | 0.304 | 0.065 | 2.2 |
| | | acting on glycosyl bonds | | | |

TABLE 4D
Proteins expressed in the culture of the Penicillium strain Strain B at a lower level than were expressed in the culture of the Penicillium
strain Strain F. Results are shown by KEGG pathway, by Gene Ontology (GO) description, means of levels for each strain (normalized spectra counts),
and the fold-change computed as log₂ StrainB/StrainF spectra count (normalized spectra counts of StrainB/StrainF).

| | | | Strain | Strain | |
|---|---|---|---|---|---|
| | | | B | F | Fold- |
| SEQID | KEGG | GO | mean | mean | change |
| 74 | E3.2.1.58, Starch and sucrose | carbohydrate metabolic process, hydrolase activity, hydrolyzing O- | 0.017 | 3.833 | −7.7 |
| | metabolism | glycosyl compounds, transferase activity | | | |
| 65 | Amino sugar and nucleotide sugar | carbohydrate metabolic process, chitin catabolic process, chitinase | 0.027 | 0.293 | −3.4 |
| | metabolism, E3.2.1.14 | activity | | | |
| 41 | None | anchored component of membrane, carbohydrate metabolic process, | 0.138 | 0.495 | −1.8 |
| | | plasma membrane, transferase activity | | | |
| 31 | Ether lipid metabolism, | hydrolase activity, acting on ester bonds, metabolic process | 0.314 | 0.547 | −0.8 |
| | Glycerophospholipid metabolism, | | | | |
| | Inositol phosphate metabolism, plcC, | | | | |
| | Thyroid hormone signaling pathway | | | | |

Table 5: Wheat radical length under normal conditions

TABLE 5A
Wheat Radical Length of seedlings grown from seeds treated with Strain
B, vs. non-treated plants, under normal watering conditions

radical length

| | Average (cm) | SE |
|---|---|---|
| Non-Treated | 2.117 | 0.185 |
| Formulation Control | 2.590 | 0.327 |
| Strain B | 2.717 | 0.185 |

TABLE 5B
Wheat Shoot Length of seedlings grown from seeds treated with Strain
B, vs. non-treated plants, under water-limited conditions

shoot length

| | Average (cm) | SE |
|---|---|---|
| Non-Treated | 1.082 | 0.216 |
| Formulation Control | 1.792 | 0.226 |
| Strain B | 2.079 | 0.202 |

### Table 6: Greenhouse Soybean Plant Yield Characteristics

TABLE 6A
Greenhouse soybean plant yield characteristics under normal (non-
water limited) watering and water-limited conditions. Soybean plants
grown from seeds treated with Strain B show improved phenotypes under
normal watering and water-limited (drought) conditions. Asterisk
indicates significance at alpha level = 0.05. P values were calculated
using a Fisher exact test (R package “stats”), one-tailed for the
beneficial effect of treatment. Asterisk indicates Bayesian significance
at posterior probability = 95%, as calculated using Bayesian
high-density interval (R package “BEST)”. Bayesian posterior
probability of a beneficial effect quantifies the posterior belief
placed on the percent improvement being beneficial, i.e. the treatment
mean being different than the control mean in the direction reported.

| | |
|---|---|
| | Percent Change |
| Traits (per plant), at days post | Strain B vs |
| planting (dpp) | Formulation Control |

Soy: Normal

| | |
|---|---|
| Dry weight of mature seeds (0% moisture), | 18% |
| harvest | |
| Fresh weight of mature seeds, harvest | 15% |
| Number of mature seeds, harvest | 10% |
| SPAD measurement of chlorophyll, 87 dpp | −19% |
| Number of pods, 77 dpp | 6% |
| Lengths of pods, 46 dpp | −2% |

Soy: Drought

| | |
|---|---|
| Dry weight of mature seeds (0% moisture), | 18% |
| harvest | |
| Fresh weight of mature seeds, harvest | 21% |
| Number of mature seeds, harvest | 18% |
| SPAD measurement of chlorophyll, 87 dpp | 16% * |
| Number of pods, 77 dpp | 27% |
| Lengths of pods, 48 dpp | 18% |
| Percent of leaves scored 3 = severe | −63% * |
| wilting, 32 dpp | |
| Percent of leaves scored 0 = no | 188% * |
| wilting, 32 dpp | |

TABLE 6B
Beneficial Penicillium endophyte Strain B imparts improved plant characteristics under
water-limited conditions in the greenhouse compared to Penicillium strain Strain F.

| | Formulation | Strain | Strain | Strain | Strain | Strain | Strain | |
|---|---|---|---|---|---|---|---|---|
| TREATMENT | Control | A | E | B | G | D | F | unit |
| Final Emergence | 2.61 | 2.44 | 2.53 | 2.56 | 2.56 | 2.18 | 2.50 | seedlings, |
| (Jan27, 12dpp) | | | | | | | | out of 3 |
| | | | | | | | | planted per |
| | | | | | | | | pot |
| Pod Count (Mar18, | 15.79 | 16.93 | 15.38 | 14.83 | 14.08 | 16.00 | 15.07 | pods per |
| 63dpp) | | | | | | | | plant |
| Seed Pre-Count | 31.14 | 32.86 | 30.23 | 30.17 | 28.54 | 31.69 | 30.50 | seeds/plant, |
| (Mar25, 70dpp) | | | | | | | | counted |
| | | | | | | | | inside pods |
| Seed Count, | 23.79 | 24.07 | 23.92 | 24.33 | 22.07 | 23.38 | 22.36 | seeds per |
| Mature (Apr27, | | | | | | | | plant, |
| 103dpp) | | | | | | | | harvested, |
| | | | | | | | | mature |
| Seed Count, | 31.14 | 32.21 * | 30.38 | 29.33 | 28.36 | 31.23 | 28.57 | seeds per |
| Mature + Immature | | | | | | | | plant, |
| (Apr28, 104dpp) | | | | | | | | harvested, |
| | | | | | | | | mature + |
| | | | | | | | | immature |
| Percent of Seeds | 76.38% | 74.72% | 78.73% | 82.95% | 77.83% | 74.88% | 78.25% | % of seeds |
| That Are Mature | | | | | | | | matured |
| (Apr27, 103dpp) | | | | | | | | |
| Seed Weight, | 3.98 | 4.00 | 4.00 | 3.91 | 3.75 | 3.96 | 3.77 | dry grams |
| Mature (Apr27, | | | | | | | | of mature |
| 103dpp) | | | | | | | | seed per |
| | | | | | | | | plant |
| Wilt Score (Feb17, | 0.89 | 0.56 | 0.88 | 0.69 | 0.78 | 0.94 | 0.89 | score (0 = no |
| 33dpp) | | | | | | | | wilt, 4 = max |
| | | | | | | | | wilt) |
| Wilt Score (Feb24, | 0.83 | 0.44 | 0.41 | 0.44 | 0.94 | 0.76 | 0.89 | score (0 = no |
| 40dpp) | | | | | | | | wilt, 4 = max |
| | | | | | | | | wilt) |
| Wilt Score (Feb25, | 1.57 | 1.00 | 1.31 | 0.83 | 1.50 | 1.23 | 1.43 | score (0 = no |
| 41dpp) | | | | | | | | wilt, 4 = max |
| | | | | | | | | wilt) |
| Wilt Score (Feb26, | 2.64 | 2.29 | 2.54 | 1.75 | 2.21 | 2.31 | 2.36 | score (0 = no |
| 42dpp) | | | | | | | | wilt, 4 = max |
| | | | | | | | | wilt) |

* indicates statistically significant values vs. all other treatments/control groups.
Bold number values indicates instances where a particular strain performed better than any other Penicillium strain or control

### Table 7: Transcriptomics Results

TABLE 7A
Qualititative transcript analysis of upregulated and downregulated genes in leaf,
root, and stem tissues of plants grown from seeds treated with Strain B, under
normal (well watered, non-water limied) and water-limited (drought) growth conditions.
“+” and “−” denote a relative increase or decrease, respectively,
when compared to control plants grown in similar conditions (formulation control).

| | Plants grown from seeds treated with | | | | | |
|---|---|---|---|---|---|---|
| | Strain B change vs. Formulation Control | | | | | |
| | Normal | | | Drought | | |
| Gene Description | root | stem | leaf | root | stem | leaf |
| 18.5 kDa class I heat shock protein | + | + | − | − | − | − |
| 2-hydroxyisoflavanone synthase | − | + | + | − | − | + |
| 3-ketoacyl-CoA synthase | − | − | − | − | − | + |
| 3-ketoacyl-CoA synthase | − | − | − | − | − | + |
| 3-ketoacyl-CoA synthase | − | − | − | − | − | + |
| 3-ketoacyl-CoA synthase | − | − | − | − | − | − |
| 50S ribosomal protein L35 | − | − | − | + | + | + |
| Acetolactate synthase | − | − | − | − | − | − |
| Alcohol-dehydrogenase | + | + | + | + | + | + |
| Aldehyde dehydrogenase | + | − | − | + | + | − |
| Aldehyde dehydrogenase | + | − | − | + | + | − |
| Aldehyde dehydrogenase | − | − | − | − | − | + |
| Amidophosphoribosyltransferase (chloroplastic) | + | − | − | − | − | − |
| Amine oxidase | − | − | − | − | + | − |
| Amine oxidase | − | − | − | + | − | − |
| Amine oxidase | − | − | + | − | − | + |
| Amine oxidase | − | − | + | − | − | + |
| Amine oxidase | + | − | − | + | − | − |
| Annexin | − | + | + | + | + | + |
| Annexin | − | + | + | + | − | + |
| Annexin | − | + | + | + | + | + |
| Annexin | − | − | − | + | − | − |
| Annexin | − | − | − | + | − | − |
| Annexin | − | − | − | + | − | − |
| Annexin | − | − | − | + | − | − |
| Annexin | − | − | + | + | − | + |
| Annexin | − | − | + | + | − | + |
| Apocytochrome f | − | − | − | − | − | − |
| Arginase | − | − | − | − | + | + |
| Arginine decarboxylase | + | − | − | − | + | − |
| Asparagine synthetase | + | + | + | − | − | − |
| Asparagine synthetase | + | + | + | − | − | − |
| Asparagine synthetase | + | + | + | − | − | − |
| Asparagine synthetase | − | − | + | + | − | − |
| Asparagine synthetase | − | − | + | + | − | − |
| Asparagine synthetase | + | + | + | − | − | − |
| Asparagine synthetase | − | − | − | + | − | + |
| Asparagine synthetase | − | − | − | + | − | + |
| Asparagine synthetase | − | − | − | + | − | + |
| ATP synthase epsilon chain (chloroplastic) | + | + | − | − | + | − |
| ATP synthase gamma chain | + | + | − | + | − | − |
| Auxin-induced protein 15A | − | − | − | − | + | − |
| Auxin-induced protein 15A | − | − | + | − | + | − |
| Auxin-induced protein 6B | − | − | − | − | + | − |
| Auxin-induced protein X15 | − | − | − | − | + | − |
| beta glucosidase 42 | − | − | − | + | + | + |
| Beta-amyrin 24-hydroxylase | + | − | + | + | + | + |
| Beta-galactosidase | − | − | − | + | − | − |
| Beta-galactosidase | − | − | − | + | − | − |
| Beta-galactosidase | − | − | − | + | − | − |
| Beta-galactosidase | − | − | − | + | − | − |
| Beta-galactosidase | + | − | − | + | − | − |
| Beta-galactosidase | + | − | − | + | − | − |
| Beta-galactosidase | − | − | + | + | − | − |
| Calcium-binding EF-hand family protein | + | − | − | + | + | + |
| Calcium-binding EF-hand family protein | + | − | − | + | + | + |
| Calmodulin-2 | − | − | − | + | + | + |
| Calmodulin-2 | + | + | + | − | + | + |
| CASP-like protein 10 | − | − | − | − | − | + |
| Chalcone synthase 7 | + | + | + | − | − | + |
| Chalcone--flavonone isomerase 1A | + | + | + | − | + | + |
| Chalcone--flavonone isomerase 1A | + | + | + | − | + | + |
| Chlorophyll a-b binding protein 2 (chloroplastic) | + | + | − | + | + | + |
| Chlorophyll a-b binding protein 2 (chloroplastic) | + | − | − | + | + | + |
| Chlorophyll a-b binding protein 3 (chloroplastic) | + | − | − | + | + | + |
| Cytochrome b6 | − | − | − | − | − | − |
| Cytochrome c oxidase subunit 1 | + | − | − | − | − | − |
| Cytochrome P450 77A3 | − | − | + | − | − | + |
| Cytochrome P450 78A3 | − | + | + | + | + | − |
| Cytochrome P450 82A4 | − | − | − | − | − | − |
| Cytochrome P450 93A3 | − | − | − | + | − | − |
| Cytochrome P450 monooxygenase CYP89H3 | − | + | + | − | + | − |
| DNA-directed RNA polymerase | − | + | + | − | − | − |
| DNA-directed RNA polymerase | − | + | + | − | − | − |
| DNA-directed RNA polymerase | − | − | − | − | − | − |
| DNA-directed RNA polymerase subunit | + | − | + | − | + | + |
| Early nodulin-36A | + | + | − | + | + | − |
| Early nodulin-70 | + | − | − | − | − | − |
| Early nodulin-93 | + | − | − | − | − | − |
| Ethylene-responsive element binding factor 4 | + | + | + | + | + | + |
| Eukaryotic translation initiation factor 6 | + | + | + | − | − | + |
| Eukaryotic translation initiation factor 6 | + | + | + | − | − | + |
| Expansin | − | − | − | − | − | − |
| Ferritin | + | + | + | − | + | − |
| Ferritin | + | − | + | − | + | − |
| Ferritin | + | − | + | − | + | − |
| Ferritin | − | + | + | − | + | − |
| Ferritin | − | + | + | − | + | − |
| Ferritin-1 (chloroplastic) | + | + | + | − | + | + |
| Ferritin-1 (chloroplastic) | + | + | + | − | + | + |
| Ferritin-2 (chloroplastic) | − | + | + | − | + | − |
| Ferritin-4 (chloroplastic) | − | − | + | − | + | − |
| Flavonoid 4′-O-methyltransferase | + | − | − | + | − | + |
| Fructose-bisphosphate aldolase | − | − | − | − | − | + |
| Fructose-bisphosphate aldolase | + | − | − | + | − | − |
| Fructose-bisphosphate aldolase | + | − | − | + | − | − |
| Fructose-bisphosphate aldolase | + | − | − | + | − | − |
| Fructose-bisphosphate aldolase | + | − | + | + | − | + |
| Fructose-bisphosphate aldolase | + | − | − | + | + | − |
| Fructose-bisphosphate aldolase | + | − | − | + | − | − |
| Fructose-bisphosphate aldolase | + | − | − | + | − | − |
| G2/mitotic-specific cyclin S13-6 | − | − | − | − | + | − |
| G2/mitotic-specific cyclin S13-7 | − | − | − | − | + | − |
| Glucan endo-1,3-beta-glucosidase (beta-1,3- | − | − | + | − | − | + |
| endoglucanase) | | | | | | |
| Glucose-1-phosphate adenylyltransferase | − | + | − | − | − | − |
| Glucose-1-phosphate adenylyltransferase | − | + | − | − | − | − |
| Glucose-1-phosphate adenylyltransferase | − | + | − | − | − | − |
| Glucose-1-phosphate adenylyltransferase | − | + | − | − | − | − |
| Glucose-1-phosphate adenylyltransferase | − | + | − | − | − | − |
| Glucose-1-phosphate adenylyltransferase | − | + | − | − | − | − |
| Glutamate receptor | − | − | + | − | − | − |
| Glutamine synthetase | + | + | − | − | − | − |
| Glutamine synthetase cytosolic isozyme 2 | + | − | − | − | − | − |
| Glutathione peroxidase | + | + | − | − | + | + |
| Glutathione peroxidase | + | + | − | − | + | + |
| Glutathione peroxidase | + | + | − | − | + | + |
| Glutathione peroxidase | + | + | − | + | − | + |
| Histone H2A | − | − | − | − | + | + |
| Histone H2A | − | − | − | − | + | + |
| Histone H2A | − | − | − | − | + | + |
| Histone H2A | − | − | − | − | + | + |
| Histone H2A | − | − | − | − | + | + |
| Histone H2A | − | − | − | − | + | + |
| Histone H2A | − | − | − | − | + | + |
| Histone H2A | − | − | − | − | + | + |
| Histone H2A | − | − | − | − | + | + |
| Histone H2A | − | − | − | − | + | + |
| Histone H2A | − | − | − | − | + | + |
| Histone H2A | − | − | − | + | + | + |
| Histone H2A | − | − | − | + | + | + |
| Histone H2A | − | − | − | − | + | + |
| Histone H2B | − | − | − | − | + | + |
| Histone H2B | − | − | − | − | + | + |
| Histone H2B | − | − | − | − | + | + |
| Histone H2B | − | − | − | − | + | + |
| Histone H2B | − | − | − | + | + | + |
| Histone H2B | − | − | − | − | + | + |
| Histone H3 | − | − | − | − | + | + |
| Histone H3 | − | − | − | − | + | + |
| Histone H3 | − | − | − | + | + | + |
| Histone H3 | − | − | − | − | + | + |
| Histone H3 | − | − | − | − | + | + |
| Histone H3 | − | − | − | + | + | + |
| Histone H3 | − | − | − | − | + | + |
| Histone H3 | − | − | − | + | + | + |
| Histone H3 | − | − | − | + | + | + |
| Histone H3 | − | − | − | + | + | + |
| Histone H3 | − | − | − | + | + | + |
| Histone H3 | − | − | − | − | + | + |
| Histone H3 | − | − | − | − | + | + |
| Histone H4 | − | − | − | − | + | + |
| Histone H4 | − | − | − | − | + | + |
| Histone H4 | − | − | − | − | + | + |
| Histone H4 | − | − | − | − | + | + |
| Histone H4 | + | − | − | − | + | + |
| Histone H4 | − | − | − | + | + | + |
| Histone H4 | − | − | − | − | + | + |
| Histone H4 | − | − | − | − | + | + |
| Histone H4 | − | − | − | + | + | + |
| Histone H4 | − | − | − | − | + | + |
| Histone H4 | − | − | − | − | + | + |
| Histone H4 | − | − | − | − | + | + |
| Histone H4 | − | − | − | − | + | + |
| Histone H4 | − | − | − | − | + | + |
| Histone H4 | − | − | − | − | + | + |
| Histone H4 | − | − | − | − | + | + |
| HMG-Y-related protein A | + | − | − | − | + | + |
| HMG-Y-related protein A | + | − | − | − | + | + |
| Leghemoglobin A | + | − | − | − | − | − |
| Leghemoglobin C1 | + | − | − | − | − | − |
| Leghemoglobin C2 | + | − | − | − | − | − |
| Leghemoglobin C3 | + | − | − | − | − | − |
| Lipase | − | − | − | + | − | − |
| Lipase | + | − | − | − | − | − |
| Lipase | − | − | − | + | − | − |
| Lipoxygenase | − | − | − | + | − | − |
| Lipoxygenase | − | − | − | + | − | − |
| Lipoxygenase | − | − | + | + | − | + |
| Lipoxygenase | − | − | + | + | − | + |
| Lipoxygenase | − | − | − | − | − | − |
| Lipoxygenase | − | − | − | + | − | + |
| Lipoxygenase | − | − | − | + | − | − |
| Lipoxygenase | + | − | + | + | − | − |
| Lipoxygenase | + | − | + | + | − | − |
| Lipoxygenase | − | − | − | − | − | + |
| Lipoxygenase | + | − | + | − | − | + |
| Lipoxygenase | + | − | + | − | − | + |
| Lipoxygenase | + | − | + | − | − | + |
| Lipoxygenase | − | + | − | + | − | − |
| Lipoxygenase | − | + | − | + | − | − |
| Lipoxygenase | − | − | + | + | − | + |
| Lipoxygenase | + | − | − | − | − | − |
| Lipoxygenase | − | − | + | − | − | − |
| Malic enzyme | − | − | + | − | + | + |
| Malic enzyme | − | − | + | − | + | + |
| MLO-like protein | − | − | − | + | − | − |
| MLO-like protein | − | − | − | + | − | − |
| MLO-like protein | + | − | + | − | − | − |
| MLO-like protein | − | − | − | + | − | − |
| MLO-like protein | − | − | + | − | − | + |
| MLO-like protein | − | + | + | + | − | − |
| Monosaccharide transporter | − | − | + | + | + | + |
| MYB transcription factor MYB187 | − | + | + | − | − | + |
| NAC domain protein | + | − | − | + | − | + |
| NADPH--cytochrome P450 reductase | − | + | + | − | − | − |
| nine-cis-epoxycarotenoid dioxygenase 4 | − | + | − | + | − | − |
| Nitrate reductase | − | − | − | − | − | − |
| Nodulin-16 | + | − | − | − | − | − |
| Nodulin-16 | + | − | − | − | − | − |
| Nodulin-20 | + | − | − | − | − | − |
| Nodulin-21 | + | − | − | − | − | − |
| Nodulin-22 | + | − | − | − | − | − |
| Nodulin-24 | + | − | − | − | − | − |
| Nodulin-24 | + | − | − | − | − | − |
| Nodulin-24 | + | − | − | − | − | − |
| Nodulin-24 | + | − | − | − | − | − |
| Nodulin-24 | + | − | − | − | − | − |
| Nodulin-24 | + | − | − | − | − | − |
| Nodulin-24 | + | − | − | − | − | − |
| Nodulin-24 | + | − | − | − | − | − |
| Nodulin-24 | + | − | − | − | − | − |
| Nodulin-24 | + | − | − | − | − | − |
| Nodulin-24 | + | − | − | − | − | − |
| Nodulin-24 | + | − | − | − | − | − |
| Nodulin-24 | + | − | − | − | − | − |
| Nodulin-24 | + | − | − | − | − | − |
| Nodulin-26 | + | − | − | + | − | − |
| Nodulin-26B | + | − | − | − | − | − |
| Nodulin-26B | + | − | − | − | − | − |
| Nodulin-26B | + | − | − | − | − | − |
| Nodulin-44 | + | − | − | − | − | − |
| Nodulin-C51 | + | − | − | − | − | − |
| Nodulin-C51 | + | − | − | − | − | − |
| Non-specific lipid-transfer protein | − | − | − | − | − | + |
| Non-specific lipid-transfer protein | − | − | + | − | − | + |
| Non-specific lipid-transfer protein | − | + | − | − | − | + |
| Non-specific lipid-transfer protein | − | − | − | − | − | + |
| Non-specific lipid-transfer protein | − | − | − | − | + | + |
| Non-specific lipid-transfer protein | − | − | + | + | − | − |
| Non-specific lipid-transfer protein | − | − | − | − | − | + |
| Non-specific lipid-transfer protein | − | − | − | − | − | + |
| Non-specific lipid-transfer protein | − | − | + | − | − | + |
| Non-specific lipid-transfer protein | − | + | − | − | − | + |
| Non-specific lipid-transfer protein | − | − | − | − | − | + |
| Non-specific lipid-transfer protein | − | − | + | − | − | + |
| Pectinesterase | − | − | − | + | − | − |
| Peptidyl-prolyl cis-trans isomerase | − | − | − | + | + | − |
| Peptidyl-prolyl cis-trans isomerase | + | − | − | + | + | + |
| Peptidyl-prolyl cis-trans isomerase | − | − | − | − | + | + |
| Peptidyl-prolyl cis-trans isomerase | − | − | − | − | − | + |
| Peptidyl-prolyl cis-trans isomerase | − | − | − | − | − | + |
| Peptidyl-prolyl cis-trans isomerase | − | − | − | − | − | + |
| Peptidyl-prolyl cis-trans isomerase | − | − | − | + | + | − |
| Peptidyl-prolyl cis-trans isomerase 1 | − | − | − | + | + | − |
| Peroxidase | − | − | − | + | + | − |
| Phenylalanine ammonia-lyase | − | − | − | − | + | − |
| Phospholipase D | − | − | + | + | − | + |
| Phosphomannomutase | − | − | − | − | − | + |
| Phosphoribulokinase | + | − | − | + | − | − |
| Phosphoribulokinase | + | − | − | + | − | + |
| Phosphorylase | + | + | + | − | − | − |
| Phosphorylase | + | + | + | − | − | − |
| photosystem I subunit F | + | − | − | + | + | − |
| Photosystem II reaction center protein J | − | − | − | − | − | − |
| Photosystem II reaction center protein Z | − | − | − | − | − | − |
| Photosystem II reaction center protein Z | − | − | − | − | − | − |
| Protein P21 | − | − | − | − | − | − |
| Protein PsbN | − | − | + | − | − | − |
| Repetitive proline-rich cell wall protein 2 | + | − | + | + | + | − |
| Repetitive proline-rich cell wall protein 3 | − | − | + | + | − | − |
| Ribose-phosphate pyrophosphokinase | − | − | − | − | − | − |
| Ribulose bisphosphate carboxylase small chain | − | − | − | − | − | + |
| Ribulose bisphosphate carboxylase small chain 1 | + | − | − | + | + | + |
| (chloroplastic) | | | | | | |
| Ribulose bisphosphate carboxylase small chain 4 | + | − | − | + | + | + |
| (chloroplastic) | | | | | | |
| Ribulose bisphosphate carboxylase small chain 4 | + | − | − | + | + | + |
| (chloroplastic) | | | | | | |
| Ribulose bisphosphate carboxylase small chain 4 | + | − | − | + | + | + |
| (chloroplastic) | | | | | | |
| Ribulose bisphosphate carboxylase small chain 4 | + | − | − | + | + | + |
| (chloroplastic) | | | | | | |
| RuBisCO-associated protein | − | − | − | − | − | − |
| S-adenosylmethionine synthase | − | − | − | − | − | + |
| S-adenosylmethionine synthase | + | + | + | − | + | − |
| Serine hydroxymethyltransferase | + | + | − | + | − | − |
| Serine hydroxymethyltransferase | − | + | + | + | − | − |
| Serine hydroxymethyltransferase | − | + | + | − | − | − |
| Serine hydroxymethyltransferase | − | − | + | − | − | − |
| Serine/threonine-protein kinase | − | − | − | + | − | − |
| Serine/threonine-protein kinase | − | + | − | − | − | + |
| Serine/threonine-protein kinase | − | + | − | − | − | + |
| Serine/threonine-protein kinase | − | + | − | − | − | + |
| Signal recognition particle 9 kDa protein | − | − | + | − | + | + |
| Site-determining protein | − | − | − | − | − | − |
| Stem 28 kDa glycoprotein | − | − | − | − | − | − |
| Stem 28 kDa glycoprotein | − | − | − | − | − | − |
| Stem 31 kDa glycoprotein | − | − | − | − | − | − |
| Stem 31 kDa glycoprotein | − | − | − | − | − | − |
| Stress-induced protein SAM22 | + | − | + | + | − | + |
| Stress-induced protein SAM22 | + | − | + | + | − | + |
| Stress-induced protein SAM22 | + | − | + | + | − | + |
| Superoxide dismutase | − | − | + | + | + | + |
| Superoxide dismutase | − | − | + | + | + | + |
| Superoxide dismutase | − | − | + | + | + | + |
| Superoxide dismutase | − | − | + | − | + | + |
| Superoxide dismutase | + | − | + | − | − | + |
| Superoxide dismutase | + | − | + | − | − | + |
| Superoxide dismutase | + | − | + | − | − | + |
| Thioredoxin | − | + | + | + | − | + |
| Thioredoxin | − | − | − | + | + | − |
| Thioredoxin | + | − | − | + | − | − |
| Thioredoxin | + | − | − | − | − | − |
| Thioredoxin | − | − | − | + | + | + |
| Thioredoxin | − | − | − | + | + | + |
| Thioredoxin | − | − | − | + | + | − |
| Thioredoxin | − | − | − | + | − | − |
| Tubulin beta-1 chain | − | + | + | + | + | + |
| UDP-glucose 6-dehydrogenase | − | + | − | + | + | + |
| Uracil-DNA glycosylase | − | − | − | − | + | + |
| Uracil-DNA glycosylase | − | − | − | − | + | + |
| Wound-induced protein | − | − | + | − | − | − |

TABLE 7B
Quantification of up- and down- regulated genes identified in qualitative transcriptomics studies, in plants grown
from seeds treated with Strain B, as compared to plants grown from seeds treated with the formulation control.

| | | Qualitative Plant Transcriptomics | | Quantitative Plant Transcriptomics | | |
|---|---|---|---|---|---|---|
| | | | Up/Down | | Up/Down | Fold |
| Tissue | Plant GeneName | Gene | Regulated | Gene | Regulated | Chang [symbol] |
| Root | Glyma.09G229200 | Purple acid phosphatase | + | purple acid phosphatase 10 | + | 1.84 |
| Root | Glyma.11G130900 | Histone H3 | + | Histone superfamily protein | + | 1.67 |
| Root | Glyma.11G035300 | Putative uncharacterized protein | + | 2-oxoglutarate (2OG) and Fe(II)- | + | 1.54 |
| | | | | dependent oxygenase superfamily | | |
| | | | | protein | | |
| Root | Glyma.15G237800 | Annexin | + | annexin 8 | + | 1.53 |
| Root | Glyma.08G189500 | Lipoxygenase | + | lipoxygenase 1 | + | 1.52 |
| Leaf | Glyma.18G255300 | Thioredoxin | + | thioredoxin H-type 5 | + | 1.51 |
| Leaf | Glyma.16G165500 | Chlorophyll a-b binding protein 2, | + | light-harvesting chlorophyll-protein | + | 1.50 |
| | | chloroplastic | | complex II subunit B1 | | |
| Leaf | Glyma.11G053400 | Soyasapogenol B glucuronide | + | UDP-glucosyl transferase 73B1 | + | 1.47 |
| | | galactosyltransferase | | | | |
| Root | Glyma.13G199500 | Annexin | + | annexin 8 | + | 1.45 |
| Leaf | Glyma.08G181000 | Soyasaponin III rhamnosyltransferase | + | UDP-Glycosyltransferase superfamily | + | 1.44 |
| | | | | protein | | |
| Leaf | Glyma.05G007100 | Carbonic anhydrase | + | carbonic anhydrase 1 | + | 1.43 |
| Root | Glyma.15G032300 | Histone H3 | + | Histone superfamily protein | + | 1.43 |
| Leaf | Glyma.03G179200 | MLO-like protein | + | Seven transmembrane MLO family | + | 1.42 |
| | | | | protein | | |
| Root | Glyma.03G028000 | Arginase | + | Arginase/deacetylase superfamily | + | 1.41 |
| | | | | protein | | |
| Leaf | Glyma.08G350800 | Beta-amyrin 24-hydroxylase | + | cytochrome P450, family 93, | + | 1.39 |
| | | | | subfamily D, polypeptide 1 | | |
| Root | Glyma.16G080100 | MLO-like protein | + | Seven transmembrane MLO family | + | 1.38 |
| | | | | protein | | |
| Root | Glyma.13G307000 | Putative uncharacterized protein | + | Peroxidase superfamily protein | + | 1.38 |
| Root | Glyma.10G292200 | Chalcone--flavonone isomerase 1B-2 | + | Chalcone-flavanone isomerase family | + | 1.37 |
| | | | | protein | | |
| Root | Glyma.05G222300 | Cytidine deaminase | + | cytidine deaminase 1 | + | 1.36 |
| Leaf | Glyma.13G347700 | Linoleate 9S-lipoxygenase-4 | + | lipoxygenase 1 | + | 1.35 |
| Root | Glyma.04G015700 | MLO-like protein | + | Seven transmembrane MLO family | + | 1.35 |
| | | | | protein | | |
| Leaf | Glyma.05G208900 | Cytochrome P450 monooxygenase | + | cytochrome P450, family 86, | + | 1.34 |
| | | CYP86A24 | | subfamily A, polypeptide 8 | | |
| Leaf | Glyma.07G001300 | Beta-amyrin synthase | + | Terpenoid cyclases family protein | + | 1.34 |
| Leaf | Glyma.07G185400 | Malate dehydrogenase | + | peroxisomal NAD-malate dehydrogenase | + | 1.32 |
| | | | | 2 | | |
| Leaf | Glyma.16G205200 | Putative uncharacterized protein | + | light harvesting complex of photosystem | + | 1.30 |
| | | | | II 5 | | |
| Leaf | Glyma.13G046200 | Ribulose bisphosphate carboxylase | + | Ribulose bisphosphate carboxylase (small | + | 1.30 |
| | | small chain 1, chloroplastic | | chain) family protein | | |
| Leaf | Glyma.19G046800 | Ribulose bisphosphate carboxylase | + | Ribulose bisphosphate carboxylase (small | + | 1.30 |
| | | small chain 4, chloroplastic | | chain) family protein | | |
| Leaf | Glyma.15G213600 | Serine/threonine-protein kinase | + | S-locus lectin protein kinase family | + | 1.29 |
| | | | | protein | | |
| Leaf | Glyma.05G201300 | Acyl carrier protein | + | acyl carrier protein 4 | + | 1.29 |
| Leaf | Glyma.11G096600 | Putative uncharacterized protein | + | NAC domain containing protein 36 | + | 1.29 |
| Leaf | Glyma.09G210900 | Phosphoribulokinase | + | phosphoribulokinase | + | 1.28 |
| Leaf | Glyma.19G046600 | Ribulose bisphosphate carboxylase | + | Ribulose bisphosphate carboxylase (small | + | 1.28 |
| | | small chain 4, chloroplastic | | chain) family protein | | |
| Leaf | Glyma.10G159700 | Cysteine synthase | + | cysteine synthase D1 | + | 1.27 |
| Leaf | Glyma.19G212600 | Pectinesterase | + | Plant invertase/pectin methylesterase | + | 1.27 |
| | | | | inhibitor superfamily | | |
| Leaf | Glyma.14G010900 | Fructose-bisphosphate aldolase | + | Aldolase superfamily protein | + | 1.27 |
| Leaf | Glyma.03G028000 | Arginase | + | Arginase/deacetylase superfamily | + | 1.27 |
| | | | | protein | | |
| Leaf | Glyma.19G007700 | Carbonic anhydrase | + | carbonic anhydrase 1 | + | 1.27 |
| Leaf | Glyma.12G198200 | Serine/threonine-protein kinase | + | S-locus lectin protein kinase family | + | 1.26 |
| | | | | protein | | |
| Leaf | Glyma.13G210800 | Glutamine synthetase | + | glutamine synthetase 2 | + | 1.26 |
| Leaf | Glyma.07G266000 | Putative uncharacterized protein | + | Cystatin/monellin superfamily protein | + | 1.25 |
| Leaf | Glyma.07G034800 | Lipoxygenase | + | lipoxygenase 1 | + | 1.24 |
| Root | Glyma.13G284200 | Putative uncharacterized protein | − | flavodoxin-like quinone reductase 1 | − | −1.20 |
| Leaf | Glyma.13G208200 | Putative uncharacterized protein | − | Eukaryotic aspartyl protease family | − | −1.20 |
| | | | | protein | | |
| Root | Glyma.17G072400 | Heat shock 70 kDa protein | − | heat shock protein 70B | − | −1.20 |
| Root | Glyma.12G102900 | Beta-amylase | − | beta-amylase 5 | − | −1.20 |
| Root | Glyma.01G162100 | Phospholipase D | − | phospholipase D delta | − | −1.20 |
| Root | Glyma.13G028200 | Photosystem Q(B) protein | − | photosystem II reaction center protein A | − | −1.20 |
| Root | Glyma.06G011700 | Glucose-1-phosphate | − | Glucose-1-phosphate | − | −1.21 |
| | | adenylyltransferase | | adenylyltransferase family protein | | |
| Root | Glyma.19G000700 | Pyruvate kinase | − | Pyruvate kinase family protein | − | −1.21 |
| Leaf | Glyma.18G202600 | Omega-3 fatty acid desaturase, | − | fatty acid desaturase 8 | − | −1.21 |
| | | chloroplastic | | | | |
| Root | Glyma.20G196900 | Superoxide dismutase | − | Fe superoxide dismutase 2 | − | −1.21 |
| Root | Glyma.04G210000 | NAD-dependent protein deacetylase | − | sirtuin 2 | − | −1.21 |
| Root | Glyma.14G182100 | NADPH--cytochrome P450 reductase | − | P450 reductase 1 | − | −1.21 |
| Leaf | Glyma.10G201100 | Pyruvate kinase | − | Pyruvate kinase family protein | − | −1.22 |
| Root | Glyma.09G037400 | DNA-directed RNA polymerase subunit | − | RNA polymerases M/15 Kd subunit | − | −1.23 |
| Root | Glyma.05G161600 | Glutathione S-transferase GST 14 | − | glutathione S-transferase tau 7 | − | −1.23 |
| Leaf | Glyma.17G153200 | Ribose-phosphate pyrophosphokinase | − | Phosphoribosyltransferase family protein | − | −1.24 |
| Root | Glyma.12G042400 | Glucose-1-phosphate | − | Glucose-1-phosphate | − | −1.24 |
| | | adenylyltransferase | | adenylyltransferase family protein | | |
| Leaf | Glyma.09G073600 | Sucrose synthase | − | sucrose synthase 4 | − | −1.25 |
| Leaf | Glyma.04G248500 | Aldehyde dehydrogenase | − | aldehyde dehydrogenase 3H1 | − | −1.26 |
| Root | Glyma.07G200200 | 18.5 kDa class I heat shock protein | − | HSP20-like chaperones superfamily | − | −1.27 |
| | | | | protein | | |
| Root | Glyma.04G011900 | Glucose-1-phosphate | − | Glucose-1-phosphate | − | −1.28 |
| | | adenylyltransferase | | adenylyltransferase family protein | | |
| Leaf | Glyma.01G129400 | Peroxisomal aminotransferase | − | alanine:glyoxylate aminotransferase 3 | − | −1.28 |
| Root | Glyma.10G193500 | Superoxide dismutase | − | Fe superoxide dismutase 2 | − | −1.28 |
| Root | Glyma.07G139700 | Probable glutathione S-transferase | − | glutathione S-transferase TAU 8 | − | −1.28 |
| Leaf | Glyma.11G170300 | Asparagine synthetase | − | glutamine-dependent asparagine | − | −1.28 |
| | | | | synthase 1 | | |
| Root | Glyma.18G080400 | Cytochrome P450 71D9 | − | cytochrome P450, family 71, | − | −1.29 |
| | | | | subfamily B, polypeptide 34 | | |
| Root | Glyma.05G000700 | Pyruvate kinase, cytosolic isozyme | − | Pyruvate kinase family protein | − | −1.33 |
| Leaf | Glyma.17G192000 | Putative uncharacterized protein | − | amino acid permease 6 | − | −1.34 |
| Leaf | Glyma.13G176100 | Polyubiquitin Ubiquitin | − | polyubiquitin 10 | − | −1.35 |
| Leaf | Glyma.05G161600 | Glutathione S-transferase GST 14 | − | glutathione S-transferase tau 7 | − | −1.36 |
| Leaf | Glyma.14G177600 | Putative uncharacterized protein | − | Cupredoxin superfamily protein | − | −1.37 |
| Root | Glyma.20G241700 | Chalcone-flavonone isomerase 2-A | − | Chalcone-flavanone isomerase family | − | −1.39 |
| | | | | protein | | |
| Leaf | Glyma.02G228100 | Asparagine synthetase | − | glutamine-dependent asparagine | − | −1.44 |
| | | | | synthase 1 | | |

[symbol]

indicates data missing or illegible when filed

TABLE 7C
Additional top up- and down- regulated genes in plants grown from seeds treated with Strain C, as compared to plants grown
from seeds treated with the formulation control, that were not identified in the qualitative transcriptomics studies.

| | | Quantitative Plant Transcriptomics | | |
|---|---|---|---|---|
| | | | Up/Down | |
| Tissue | Plant Gene Name | Gene | Regulated | Fold Change |
| Root | Glyma.06G031600.1 | AMP-dependent synthetase and ligase family protein | + | 2.54 |
| Leaf | Glyma.16G169400.1 | receptor like protein 19 | + | 2.18 |
| Root | Glyma.20G047000.1 | Protein kinase protein with adenine nucleotide alpha hydrolases- | + | 2.11 |
| | | like domain | | |
| Root | Glyma.12G130700.1 | Cysteine proteinases superfamily protein | + | 2.04 |
| Leaf | Glyma.13G272300.1 | sodium/calcium exchanger family protein/calcium-binding EF hand | + | 1.92 |
| | | family protein | | |
| Root | Glyma.10G231700.1 | ferric reduction oxidase 2 | + | 1.92 |
| Root | Glyma.13G336600.1 | expansin A4 | + | 1.91 |
| Root | Glyma.03G039800.1 | Peroxidase superfamily protein | + | 1.85 |
| Root | Glyma.13G281200.1 | Late embryogenesis abundant (LEA) protein-related | + | 1.84 |
| Root | Glyma.07G113500.1 | H(+)-ATPase 11 | + | 1.83 |
| Root | Glyma.10G125000.1 | Pectin lyase-like superfamily protein | + | 1.81 |
| Root | Glyma.14G218100.1 | Putative lysine decarboxylase family protein | + | 1.81 |
| Root | Glyma.04G073500.1 | potassium channel in Arabidopsis thaliana 3 | + | 1.79 |
| Root | Glyma.16G120300.1 | SGNH hydrolase-type esterase superfamily protein | + | 1.79 |
| Root | Glyma.04G180400.1 | BURP domain-containing protein | + | 1.78 |
| Leaf | Glyma.14G209600.1 | AMP-dependent synthetase and ligase family protein | + | 1.78 |
| Root | Glyma.06G284900.1 | Basic-leucine zipper (bZIP) transcription factor family protein | + | 1.77 |
| Root | Glyma.19G251100.1 | Protein kinase superfamily protein | + | 1.75 |
| Root | Glyma.06G273400.1 | Cysteine proteinases superfamily protein | + | 1.75 |
| Root | Glyma.01G020000.1 | ABC-2 type transporter family protein | + | 1.75 |
| Root | Glyma.11G024300.1 | C2 calcium/lipid-binding plant phosphoribosyltransferase family protein | + | 1.74 |
| Root | Glyma.03G113400.1 | H(+)-ATPase 11 | + | 1.73 |
| Root | Glyma.01G211000.1 | Glycosyl hydrolases family 32 protein | + | 1.73 |
| Leaf | Glyma.07G205400.1 | Cysteine proteinases superfamily protein | + | 1.73 |
| Root | Glyma.18G125200.1 | Integrase-type DNA-binding superfamily protein | + | 1.73 |
| Root | Glyma.08G323400.1 | MBOAT (membrane bound O-acyl transferase) family protein | + | 1.72 |
| Root | Glyma.11G056900.1 | Acyl transferase/acyl hydrolase/lysophospholipase superfamily protein | + | 1.71 |
| Root | Glyma.13G178700.1 | Pollen Ole e 1 allergen and extensin family protein | + | 1.71 |
| Root | Glyma.17G057300.1 | Auxin efflux carrier family protein | + | 1.71 |
| Root | Glyma.02G142400.1 | indoleacetic acid-induced protein 16 | + | 1.69 |
| Root | Glyma.12G027200.1 | glycosyl hydrolase 9C1 | + | 1.69 |
| Root | Glyma.03G092800.1 | non-specific phospholipase C3 | + | 1.69 |
| Root | Glyma.14G123500.1 | phosphate transporter 1;1 | + | 1.69 |
| Root | Glyma.02G046800.1 | Glycosyl hydrolase family 38 protein | + | 1.68 |
| Root | Glyma.13G342600.1 | AMP-dependent synthetase and ligase family protein | + | 1.68 |
| Root | Glyma.20G199400.1 | | + | 1.68 |
| Root | Glyma.13G132500.1 | nodulin MtN21/EamA-like transporter family protein | + | 1.68 |
| Leaf | Glyma.16G172100.1 | disease resistance family protein/LRR family protein | + | 1.67 |
| Root | Glyma.10G119900.1 | glycerol-3-phosphate acyltransferase 6 | + | 1.67 |
| Root | Glyma.06G123900.1 | glycosyl hydrolase 9A1 | + | 1.67 |
| Leaf | Glyma.16G175500.1 | UDP-glucosyl transferase 88A1 | + | 1.67 |
| Leaf | Glyma.07G254600.1 | UDP-Glycosyltransferase superfamily protein | + | 1.67 |
| Leaf | Glyma.16G174600.1 | disease resistance family protein/LRR family protein | + | 1.66 |
| Root | Glyma.19G212400.1 | Plant invertase/pectin methylesterase inhibitor superfamily | + | 1.66 |
| Root | Glyma.12G185800.1 | germin-like protein 10 | + | 1.66 |
| Root | Glyma.17G179400.1 | Disease resistance protein (CC-NBS-LRR class) family | + | 1.65 |
| Root | Glyma.15G086000.1 | FASCICLIN-like arabinogalactan-protein 12 | + | 1.65 |
| Root | Glyma.08G167700.1 | Myzus persicae-induced lipase 1 | + | 1.65 |
| Leaf | Glyma.16G171800.1 | receptor like protein 15 | + | 1.64 |
| Leaf | Glyma.10G104700.1 | UDP-Glycosyltransferase superfamily protein | + | 1.64 |
| Leaf | Glyma.15G221300.1 | UDP-glucosyl transferase 73B3 | + | 1.62 |
| Leaf | Glyma.14G015500.1 | receptor like protein 6 | + | 1.62 |
| Leaf | Glyma.20G047400.1 | Cofactor-independent phosphoglycerate mutase | + | 1.61 |
| Leaf | Glyma.16G197500.1 | 2-oxoglutarate (2OG) and Fe(II)-dependent oxygenase superfamily protein | + | 1.59 |
| Leaf | Glyma.12G206500.1 | | + | 1.59 |
| Leaf | Glyma.13G183200.1 | | + | 1.58 |
| Leaf | Glyma.06G324300.1 | cellulose synthase like G1 | + | 1.57 |
| Leaf | Glyma.19G030800.1 | HXXXD-type acyl-transferase family protein | + | 1.56 |
| Leaf | Glyma.16G187100.1 | disease resistance family protein/LRR family protein | + | 1.55 |
| Leaf | Glyma.16G171200.1 | disease resistance family protein/LRR family protein | + | 1.55 |
| Leaf | Glyma.19G133300.1 | 2-oxoglutarate (2OG) and Fe(II)-dependent oxygenase superfamily protein | + | 1.54 |
| Leaf | Glyma.04G233800.1 | | + | 1.54 |
| Leaf | Glyma.03G215100.1 | Protein of unknown function, DUF538 | + | 1.53 |
| Leaf | Glyma.17G134200.1 | cytochrome P450, family 706, subfamily A, polypeptide 4 | + | 1.52 |
| Leaf | Glyma.16G211700.1 | Kunitz family trypsin and protease inhibitor protein | + | 1.52 |
| Leaf | Glyma.01G198100.1 | basic helix-loop-helix (bHLH) DNA-binding superfamily protein | + | 1.52 |
| Leaf | Glyma.15G160600.1 | Ankyrin repeat family protein | + | 1.51 |
| Leaf | Glyma.16G174800.1 | disease resistance family protein/LRR family protein | + | 1.51 |
| Leaf | Glyma.03G141600.1 | Leucine-rich repeat protein kinase family protein | + | 1.51 |
| Leaf | Glyma.06G056400.1 | Leucine-rich receptor-like protein kinase family protein | + | 1.50 |
| Leaf | Glyma.19G202900.1 | alpha/beta-Hydrolases superfamily protein | + | 1.50 |
| Leaf | Glyma.16G169900.1 | disease resistance family protein/LRR family protein | + | 1.49 |
| Leaf | Glyma.16G170700.1 | disease resistance family protein/LRR family protein | + | 1.49 |
| Leaf | Glyma.01G160100.1 | basic chitinase | + | 1.49 |
| Leaf | Glyma.05G044000.1 | Pectin lyase-like superfamily protein | + | 1.48 |
| Leaf | Glyma.20G154700.1 | Pyridoxal phosphate (PLP)-dependent transferases superfamily protein | + | 1.48 |
| Leaf | Glyma.18G106300.1 | rhamnose biosynthesis 1 | + | 1.48 |
| Leaf | Glyma.01G192400.1 | | + | 1.48 |
| Leaf | Glyma.19G000900.1 | actin-11 | + | 1.48 |
| Leaf | Glyma.05G176700.1 | | + | 1.47 |
| Leaf | Glyma.11G218400.1 | | − | −1.45 |
| Leaf | Glyma.12G207400.1 | Thioredoxin superfamily protein | − | −1.46 |
| Leaf | Glyma.02G127300.1 | Peroxidase superfamily protein | − | −1.46 |
| Leaf | Glyma.05G063600.1 | ethylene responsive element binding factor 1 | − | −1.46 |
| Leaf | Glyma.16G100100.1 | Bifunctional inhibitor/lipid-transfer protein/seed storage 2S albumin | − | −1.46 |
| | | superfamily protein | | |
| Leaf | Glyma.20G168500.1 | Integrase-type DNA-binding superfamily protein | − | −1.47 |
| Leaf | Glyma.12G116900.1 | Zinc finger C-x8-C-x5-C-x3-H type family protein | − | −1.47 |
| Leaf | Glyma.16G164800.1 | Integrase-type DNA-binding superfamily protein | − | −1.47 |
| Leaf | Glyma.11G062600.1 | cytochrome P450, family 71, subfamily B, polypeptide 34 | − | −1.47 |
| Leaf | Glyma.16G188800.1 | Bifunctional inhibitor/lipid-transfer protein/seed storage 2S albumin | − | −1.47 |
| | | superfamily protein | | |
| Leaf | Glyma.19G038600.1 | ATPase E1-E2 type family protein/haloacid dehalogenase-like hydrolase | − | −1.48 |
| | | family protein | | |
| Root | Glyma.08G068700.1 | HSP20-like chaperones superfamily protein | − | −1.48 |
| Leaf | Glyma.06G157400.1 | NAC (No Apical Meristem) domain transcriptional regulator superfamily | − | −1.48 |
| | | protein | | |
| Root | Glyma.20G188700.1 | RNI-like superfamily protein | − | −1.48 |
| Root | Glyma.15G106200.1 | adenosine/AMP deaminase family protein | − | −1.48 |
| Root | Glyma.16G162600.1 | chlorophyll A/B binding protein 1 | − | −1.48 |
| Leaf | Glyma.18G197400.1 | Laccase/Diphenol oxidase family protein | − | −1.48 |
| Root | Glyma.03G114300.1 | homeobox-leucine zipper protein 3 | − | −1.48 |
| Root | Glyma.03G101200.1 | Fatty acid hydroxylase superfamily | − | −1.48 |
| Leaf | Glyma.06G195000.1 | expansin A15 | − | −1.48 |
| Leaf | Glyma.12G221500.1 | NAC domain containing protein 3 | − | −1.48 |
| Leaf | Glyma.13G279900.1 | NAC domain containing protein 3 | − | −1.48 |
| Leaf | Glyma.05G108200.1 | basic leucine-zipper 5 | − | −1.49 |
| Leaf | Glyma.04G097900.1 | MATE efflux family protein | − | −1.49 |
| Leaf | Glyma.05G126800.1 | | − | −1.49 |
| Root | Glyma.11G095100.1 | Glycosyl hydrolase superfamily protein | − | −1.49 |
| Root | Glyma.02G058000.1 | Major facilitator superfamily protein | − | −1.49 |
| Leaf | Glyma.06G154200.1 | cation/hydrogen exchanger 15 | − | −1.49 |
| Leaf | Glyma.10G192900.1 | glutathione S-transferase TAU 15 | − | −1.49 |
| Leaf | Glyma.16G158600.1 | SNF1-related protein kinase 2.9 | − | −1.50 |
| Leaf | Glyma.08G244800.1 | UDP-Glycosyltransferase superfamily protein | − | −1.50 |
| Root | Glyma.08G342000.1 | kunitz trypsin inhibitor 1 | − | −1.50 |
| Root | Glyma.01G219300.1 | root hair specific 8 | − | −1.50 |
| Root | Glyma.16G141000.1 | Major facilitator superfamily protein | − | −1.51 |
| Leaf | Glyma.10G007000.1 | ethylene response factor 1 | − | −1.51 |
| Leaf | Glyma.02G224800.1 | Laccase/Diphenol oxidase family protein | − | −1.51 |
| Leaf | Glyma.14G081300.1 | phospholipase A 2A | − | −1.51 |
| Root | Glyma.09G210500.1 | | − | −1.51 |
| Root | Glyma.07G200500.1 | HSP20-like chaperones superfamily protein | − | −1.51 |
| Root | Glyma.14G106700.1 | Protein of unknown function (DUF1677) | − | −1.51 |
| Root | Glyma.18G129800.1 | | − | −1.52 |
| Root | Glyma.16G163300.1 | | − | −1.52 |
| Leaf | Glyma.14G103100.1 | WRKY DNA-binding protein 40 | − | −1.52 |
| Leaf | Glyma.05G184500.1 | WRKY DNA-binding protein 51 | − | −1.52 |
| Root | Glyma.11G024100.1 | glutathione peroxidase 6 | − | −1.52 |
| Leaf | Glyma.11G180700.1 | BRI1-associated receptor kinase | − | −1.52 |
| Root | Glyma.12G180000.1 | magnesium (Mg) transporter 10 | − | −1.52 |
| Root | Glyma.16G159300.1 | Disease resistance protein (TIR-NBS-LRR class) family | − | −1.52 |
| Leaf | Glyma.10G010100.1 | NIM1-interacting 1 | − | −1.53 |
| Root | Glyma.16G187500.1 | disease resistance family protein/LRR family protein | − | −1.53 |
| Leaf | Glyma.02G009500.1 | NIM1-interacting 1 | − | −1.53 |
| Leaf | Glyma.18G190000.1 | Bifunctional inhibitor/lipid-transfer protein/seed storage 2S albumin | − | −1.53 |
| | | superfamily protein | | |
| Leaf | Glyma.17G147600.1 | expansin-like B1 | − | −1.53 |
| Root | Glyma.18G094600.1 | heat shock protein 21 | − | −1.54 |
| Root | Glyma.09G111900.1 | fatty acid desaturase 2 | − | −1.54 |
| Leaf | Glyma.19G136700.1 | UDP-glycosyltransferase 73B4 | − | −1.55 |
| Leaf | Glyma.16G195900.1 | Tetratricopeptide repeat (TPR)-like superfamily protein | − | −1.58 |
| Root | Glyma.01G081600.1 | Major facilitator superfamily protein | − | −1.58 |
| Root | Glyma.09G070500.1 | strictosidine synthase-like 4 | − | −1.59 |
| Leaf | Glyma.01G137500.1 | SAUR-like auxin-responsive protein family | − | −1.59 |
| Leaf | Glyma.16G189900.1 | CAP160 protein | − | −1.60 |
| Root | Glyma.16G195700.1 | Tetratricopeptide repeat (TPR)-like superfamily protein | − | −1.61 |
| Root | Glyma.16G188800.1 | Bifunctional inhibitor/lipid-transfer protein/seed storage 2S albumin | − | −1.61 |
| | | superfamily protein | | |
| Leaf | Glyma.18G231500.1 | | − | −1.61 |
| Leaf | Glyma.11G051800.1 | cytochrome P450, family 81, subfamily D, polypeptide 3 | − | −1.61 |
| Leaf | Glyma.12G149100.1 | NAC (No Apical Meristem) domain transcriptional regulator superfamily | − | −1.61 |
| | | protein | | |
| Root | Glyma.04G082300.1 | tocopherol cyclase, chloroplast/vitamin E deficient 1 (VTE1)/sucrose | − | −1.61 |
| | | export defective 1 (SXD1) | | |
| Root | Glyma.16G159100.1 | Disease resistance protein (TIR-NBS-LRR class) family | − | −1.62 |
| Root | Glyma.12G132600.1 | Protein kinase superfamily protein | − | −1.62 |
| Root | Glyma.14G063700.1 | HSP20-like chaperones superfamily protein | − | −1.64 |
| Root | Glyma.16G195600.1 | cytochrome P450, family 71, subfamily A, polypeptide 26 | − | −1.65 |
| Root | Glyma.15G062400.1 | basic pathogenesis-related protein 1 | − | −1.65 |
| Root | Glyma.13G291800.1 | late embryogenesis abundant domain-containing protein/LEA domain- | − | −1.65 |
| | | containing protein | | |
| Root | Glyma.16G173000.1 | chitinase A | − | −1.71 |
| Root | Glyma.16G182400.1 | Plant regulator RWP-RK family protein | − | −1.83 |
| Root | Glyma.16G159200.1 | Disease resistance protein (TIR-NBS-LRR class) family | − | −1.86 |
| Root | Glyma.16G175800.1 | Glycosyl hydrolases family 32 protein | − | −1.90 |
| Root | Glyma.12G132500.1 | UDP-Glycosyltransferase superfamily protein | − | −1.90 |
| Root | Glyma.16G168400.1 | VIRE2-interacting protein 1 | − | −1.92 |
| Root | Glyma.05G095600.1 | Amino acid kinase family protein | − | −1.96 |

TABLE 7D
Transcripts that are significantly up- or down- regulated in soybean plants grown
from seeds treated with Strain A or Strain B but that are not found to be significantly up- or
down- regulated in soybean plants grown from seeds treated with Strain F. Fold change is
expressed as Strain A (or Strain B) versus formulation control.

| | | | Fold | |
|---|---|---|---|---|
| Tissue | Transcript | label | Change | Transcript Name |
| Root | Glyma.15G019200.2 | StrainA vs Formulation | 7.09 | pleiotropic drug resistance 1 |
| Leaf | Glyma.07G144800.2 | StrainA vs Formulation | 6.03 | Transducin/WD40 repeat-like |
| | | | | superfamily protein |
| Root | Glyma.16G155800.1 | StrainA vs Formulation | 5.92 | histidinol phosphate |
| | | | | aminotransferase 1 |
| Root | Glyma.15G234500.1 | StrainA vs Formulation | 5.61 | |
| Leaf | Glyma.15G167100.7 | StrainA vs Formulation | 4.98 | |
| Root | Glyma.08G196700.6 | StrainA vs Formulation | 4.76 | |
| Root | Glyma.13G152800.2 | StrainA vs Formulation | 4.59 | |
| Root | Glyma.05G018500.5 | StrainA vs Formulation | 4.37 | galacturonosyltransferase 11 |
| Root | Glyma.16G105400.1 | StrainA vs Formulation | 4.13 | tetratricopeptide repeat (TPR)- |
| | | | | containing protein |
| Root | Glyma.13G124800.1 | StrainA vs Formulation | 4.09 | AGC (cAMP-dependent, cGMP- |
| | | | | dependent and protein kinase C) |
| | | | | kinase family protein |
| Root | Glyma.08G196700.6 | StrainB vs Formulation | 4.07 | |
| Leaf | Glyma.12G088600.5 | StrainA vs Formulation | 3.71 | |
| Leaf | Glyma.15G111700.1 | StrainA vs Formulation | 3.66 | Ribosomal protein L4/L1 family |
| Root | Glyma.08G288500.1 | StrainA vs Formulation | 3.51 | K+ uptake permease 6 |
| Leaf | Glyma.12G225400.2 | StrainA vs Formulation | 3.51 | embryo defective 2737 |
| Root | Glyma.16G040900.3 | StrainA vs Formulation | 3.44 | adenosine-5\′-phosphosulfate (APS) |
| | | | | kinase 3 |
| Root | Glyma.06G107200.2 | StrainA vs Formulation | 3.40 | electron carriers; protein disulfide |
| | | | | oxidoreductases |
| Root | Glyma.12G142100.1 | StrainB vs Formulation | 3.31 | S-locus lectin protein kinase family |
| | | | | protein |
| Root | Glyma.20G220200.1 | StrainA vs Formulation | 3.23 | phloem protein 2-B10 |
| Root | Glyma.13G152800.2 | StrainB vs Formulation | 3.16 | |
| Leaf | Glyma.04G152200.7 | StrainA vs Formulation | 3.15 | |
| Root | Glyma.08G005500.2 | StrainA vs Formulation | 3.05 | |
| Root | Glyma.10G035200.6 | StrainA vs Formulation | 3.03 | alpha/beta-Hydrolases superfamily |
| | | | | protein |
| Root | Glyma.05G018500.5 | StrainB vs Formulation | 2.95 | galacturonosyltransferase 11 |
| Root | Glyma.16G123800.10 | StrainB vs Formulation | 2.93 | PLAC8 family protein |
| Root | Glyma.10G083600.6 | StrainA vs Formulation | 2.89 | |
| Leaf | Glyma.12G040400.13 | StrainA vs Formulation | 2.76 | ARM repeat superfamily protein |
| Root | Glyma.12G163500.6 | StrainB vs Formulation | 2.68 | Phospholipid/glycerol |
| | | | | acyltransferase family protein |
| Root | Glyma.04G128700.3 | StrainB vs Formulation | −2.73 | SCP1-like small phosphatase 4 |
| Leaf | Glyma.12G211300.3 | StrainA vs Formulation | −2.77 | Protein of unknown function |
| | | | | (DUF688) |
| Root | Glyma.09G135200.5 | StrainA vs Formulation | −2.83 | NAD(P)-binding Rossmann-fold |
| | | | | superfamily protein |
| Leaf | Glyma.01G099800.2 | StrainA vs Formulation | −2.83 | delta 1-pyrroline-5-carboxylate |
| | | | | synthase 2 |
| Root | Glyma.04G185500.2 | StrainA vs Formulation | −3.07 | |
| Leaf | Glyma.01G013600.1 | StrainA vs Formulation | −3.08 | basic region/leucine zipper |
| | | | | transcription factor 16 |
| Leaf | Glyma.05G207400.3 | StrainA vs Formulation | −3.08 | Protein kinase protein with |
| | | | | tetratricopeptide repeat domain |
| Leaf | Glyma.04G165100.1 | StrainA vs Formulation | −3.13 | Plant protein of unknown function |
| | | | | (DUF863) |
| Root | Glyma.12G142100.2 | StrainB vs Formulation | −3.16 | S-locus lectin protein kinase family |
| | | | | protein |
| Root | Glyma.15G176500.2 | StrainA vs Formulation | −3.18 | growth-regulating factor 5 |
| Root | Glyma.04G105000.2 | StrainA vs Formulation | −3.22 | tRNA modification GTPase, putative |
| Root | Glyma.03G244500.9 | StrainB vs Formulation | −3.28 | Transducin/WD40 repeat-like |
| | | | | superfamily protein |
| Leaf | Glyma.17G126200.1 | StrainA vs Formulation | −3.72 | Transducin/WD40 repeat-like |
| | | | | superfamily protein |
| Root | Glyma.11G232900.1 | StrainA vs Formulation | −3.76 | P-loop containing nucleoside |
| | | | | triphosphate hydrolases superfamily |
| | | | | protein |
| Root | Glyma.13G337100.2 | StrainA vs Formulation | −3.83 | TRF-like 2 |
| Root | Glyma.14G098000.3 | StrainB vs Formulation | −4.00 | G protein alpha subunit 1 |
| Root | Glyma.01G122100.4 | StrainB vs Formulation | −4.59 | LMBR1-like membrane protein |
| Root | Glyma.10G243200.1 | StrainB vs Formulation | −4.65 | DNA repair (Rad51) family protein |
| Leaf | Glyma.20G156500.2 | StrainA vs Formulation | −5.14 | Homeobox-leucine zipper family |
| | | | | protein/lipid-binding START |
| | | | | domain-containing protein |
| Root | Glyma.14G098000.3 | StrainA vs Formulation | −5.20 | G protein alpha subunit 1 |
| Leaf | Glyma.17G170900.7 | StrainA vs Formulation | −5.38 | PLC-like phosphodiesterases |
| | | | | superfamily protein |
| Root | Glyma.02G157700.3 | StrainB vs Formulation | −5.51 | binding |
| Root | Glyma.13G116800.1 | StrainB vs Formulation | −6.61 | Alkaline-phosphatase-like family |
| | | | | protein |
| Root | Glyma.13G332300.3 | StrainA vs Formulation | −6.95 | sequence-specific DNA |
| | | | | binding; sequence-specific DNA |
| | | | | binding transcription factors |
| Root | Glyma.13G031600.3 | StrainA vs Formulation | −8.39 | amino acid permease 2 |
| Root | Glyma.04G201400.2 | StrainB vs Formulation | −9.04 | DCD (Development and Cell Death) |
| | | | | domain protein |
| Root | Glyma.06G098900.2 | StrainA vs Formulation | −9.31 | phosphoenolpyruvate carboxylase- |
| | | | | related kinase 2 |
| Root | Glyma.02G282700.2 | StrainA vs Formulation | −14.60 | helicase in vascular tissue and |
| | | | | tapetum |

TABLE 7E
Genes that are up- or down- regulated at least 1.5 fold higher or lower in the beneficial Penicillium
strains Strain A or Strain B as compared to the control Penicillium strain Strain F.

| | | | | Strain | Strain | | |
|---|---|---|---|---|---|---|---|
| | | | | B/ | A/ | | |
| | Strain | Strain | Strain | Strain | Strain | | |
| Tissue | B | A | F | F | F | Gene Name | Gene Description |
| Leaf | 2.18 | 2.51 | 1.05 | 2.07 | 2.38 | Glyma.16G169400 | receptor like protein 19 |
| Leaf | −1.58 | −2.11 | −1.01 | 1.56 | 2.09 | Glyma.16G195900 | Tetratricopeptide repeat (TPR)-like superfamily protein |
| Leaf | 1.66 | 2.08 | 1.03 | 1.61 | 2.02 | Glyma.16G174600 | disease resistance family protein/LRR family protein |
| Leaf | 1.40 | 2.02 | 1.13 | 1.24 | 1.79 | Glyma.16G172600 | multidrug resistance-associated protein 14 |
| Leaf | −1.03 | −1.76 | −1.01 | 1.03 | 1.75 | Glyma.U005800 | |
| Leaf | 1.51 | 1.78 | 1.02 | 1.48 | 1.74 | Glyma.16G174800 | disease resistance family protein/LRR family protein |
| Leaf | 1.64 | 1.72 | 1.01 | 1.62 | 1.70 | Glyma.16G171800 | receptor like protein 15 |
| Leaf | 1.18 | 1.79 | 1.06 | 1.11 | 1.68 | Glyma.16G138400 | RAD-like 6 |
| Leaf | −1.43 | −1.70 | −1.02 | 1.40 | 1.67 | Glyma.16G168400 | VIRE2-interacting protein 1 |
| Leaf | 1.55 | 1.72 | 1.03 | 1.51 | 1.67 | Glyma.16G187100 | disease resistance family protein/LRR family protein |
| Leaf | −1.08 | −1.67 | −1.01 | 1.08 | 1.66 | Glyma.16G174200 | P-loop containing nucleoside triphosphate hydrolases |
| | | | | | | | superfamily protein |
| Leaf | 1.49 | 1.68 | 1.02 | 1.47 | 1.65 | Glyma.16G169900 | disease resistance family protein/LRR family protein |
| Leaf | 1.28 | 1.64 | 1.01 | 1.26 | 1.62 | Glyma.16G174000 | receptor like protein 1 |
| Leaf | 1.43 | 1.67 | 1.04 | 1.38 | 1.61 | Glyma.16G158400 | Laccase/Diphenol oxidase family protein |
| Leaf | 1.40 | 1.63 | 1.02 | 1.37 | 1.60 | Glyma.17G182200 | receptor like protein 30 |
| Leaf | −1.01 | −1.66 | −1.05 | 0.97 | 1.59 | Glyma.01G163400 | |
| Leaf | −1.41 | −1.77 | −1.12 | 1.26 | 1.58 | Glyma.16G195800 | cytochrome P450, family 71, subfamily A, polypeptide 22 |
| Leaf | −1.52 | −1.88 | −1.19 | 1.28 | 1.58 | Glyma.05G184500 | WRKY DNA-binding protein 51 |
| Leaf | 1.01 | 1.87 | 1.18 | 0.85 | 1.58 | Glyma.03G015800 | BON association protein 2 |
| Leaf | 1.17 | 1.61 | 1.03 | 1.14 | 1.57 | Glyma.16G169600 | receptor like protein 6 |
| Leaf | 1.10 | 1.76 | 1.12 | 0.98 | 1.57 | Glyma.02G101300 | Cytochrome b561/ferric reductase transmembrane protein |
| | | | | | | | family |
| Leaf | −1.31 | −1.68 | −1.07 | 1.22 | 1.56 | Glyma.16G173000 | chitinase A |
| Leaf | 1.45 | 1.61 | 1.03 | 1.41 | 1.56 | Glyma.16G170800 | disease resistance family protein/LRR family protein |
| Leaf | 1.14 | 1.58 | 1.02 | 1.11 | 1.55 | Glyma.13G321100 | terpene synthase 03 |
| Leaf | 1.29 | 1.59 | 1.03 | 1.26 | 1.54 | Glyma.16G168700 | receptor like protein 19 |
| Leaf | −1.10 | −1.64 | −1.07 | 1.03 | 1.53 | Glyma.01G126600 | Disease resistance-responsive (dirigent-like protein) family |
| | | | | | | | protein |
| Leaf | 1.33 | 1.81 | 1.18 | 1.13 | 1.53 | Glyma.U037600 | disease resistance family protein/LRR family protein |
| Leaf | −1.01 | −1.62 | −1.06 | 0.96 | 1.53 | Glyma.09G164000 | |
| Leaf | 1.16 | 1.92 | 1.26 | 0.92 | 1.53 | Glyma.16G178400 | Heavy metal transport/detoxification superfamily protein |
| Leaf | −1.03 | −1.62 | −1.07 | 0.96 | 1.52 | Glyma.05G084500 | |
| Leaf | 1.04 | 1.69 | 1.12 | 0.93 | 1.52 | Glyma.06G135900 | |
| Leaf | 1.49 | 1.60 | 1.06 | 1.41 | 1.52 | Glyma.16G170700 | disease resistance family protein/LRR family protein |
| Leaf | −1.01 | −1.62 | −1.07 | 0.95 | 1.52 | Glyma.08G269900 | |
| Leaf | 1.67 | 1.69 | 1.12 | 1.50 | 1.51 | Glyma.16G172100 | disease resistance family protein/LRR family protein |
| Leaf | 1.24 | 1.55 | 1.03 | 1.21 | 1.51 | Glyma.16G185800 | disease resistance family protein/LRR family protein |
| Leaf | 1.06 | −1.61 | 1.07 | 1.00 | −1.50 | Glyma.U007200 | |
| Leaf | 1.38 | 1.52 | −1.01 | −1.37 | −1.51 | Glyma.16G156100 | leucine-rich repeat transmembrane protein kinase family |
| | | | | | | | protein |
| Leaf | 1.02 | −1.55 | 1.01 | 1.01 | −1.53 | Glyma.07G079100 | |
| Leaf | −1.52 | −1.60 | 1.03 | −1.48 | −1.56 | Glyma.14G103100 | WRKY DNA-binding protein 40 |
| Leaf | 1.02 | −1.60 | 1.01 | 1.01 | −1.58 | Glyma.14G063700 | HSP20-like chaperones superfamily protein |
| Leaf | −1.50 | −1.70 | 1.05 | −1.42 | −1.61 | Glyma.16G158600 | SNF1-related protein kinase 2.9 |
| Leaf | −1.27 | −1.66 | 1.03 | −1.23 | −1.62 | Glyma.16G175000 | disease resistance family protein/LRR family protein |
| Leaf | −1.02 | −1.72 | 1.03 | −0.99 | −1.66 | Glyma.13G023200 | |
| Leaf | 1.59 | 1.70 | −1.00 | −1.59 | −1.69 | Glyma.16G197500 | 2-oxoglutarate (2OG) and Fe(II)-dependent oxygenase |
| | | | | | | | superfamily protein |
| Leaf | 1.26 | 1.72 | −1.01 | −1.25 | −1.71 | Glyma.16G169700 | receptor like protein 27 |
| Leaf | 1.55 | 1.72 | −1.00 | −1.55 | −1.72 | Glyma.16G171200 | disease resistance family protein/LRR family protein |
| Leaf | 2.18 | 2.51 | 1.05 | 2.07 | 2.38 | Glyma.16G169400 | receptor like protein 19 |
| Leaf | −1.58 | −2.11 | −1.01 | 1.56 | 2.09 | Glyma.16G195900 | Tetratricopeptide repeat (TPR)-like superfamily protein |
| Leaf | 1.66 | 2.08 | 1.03 | 1.61 | 2.02 | Glyma.16G174600 | disease resistance family protein/LRR family protein |
| Leaf | 1.64 | 1.72 | 1.01 | 1.62 | 1.70 | Glyma.16G171800 | receptor like protein 15 |
| Leaf | 1.55 | 1.72 | 1.03 | 1.51 | 1.67 | Glyma.16G187100 | disease resistance family protein/LRR family protein |
| Leaf | −1.59 | −1.34 | 1.04 | −1.53 | −1.29 | Glyma.01G137500 | SAUR-like auxin-responsive protein family |
| Leaf | 1.59 | 1.70 | −1.00 | −1.59 | −1.69 | Glyma.16G197500 | 2-oxoglutarate (2OG) and Fe(II)-dependent oxygenase |
| | | | | | | | superfamily protein |
| Leaf | 1.55 | 1.72 | −1.00 | −1.55 | −1.72 | Glyma.16G171200 | disease resistance family protein/LRR family protein |
| Root | −1.92 | −2.08 | −1.03 | 1.87 | 2.02 | Glyma.16G168400 | VIRE2-interacting protein 1 |
| Root | −1.83 | −2.21 | −1.03 | 1.77 | 2.14 | Glyma.16G182400 | Plant regulator RWP-RK family protein |
| Root | −1.65 | −1.52 | −1.01 | 1.63 | 1.50 | Glyma.16G195600 | cytochrome P450, family 71, subfamily A, polypeptide 26 |
| Root | −1.71 | −1.82 | −1.10 | 1.55 | 1.65 | Glyma.16G173000 | chitinase A |
| Root | 1.56 | 1.70 | 1.03 | 1.52 | 1.66 | Glyma.16G199800 | |
| Root | −1.61 | −1.93 | −1.13 | 1.43 | 1.71 | Glyma.16G195700 | Tetratricopeptide repeat (TPR)-like superfamily protein |
| Root | −1.42 | −1.75 | −1.04 | 1.37 | 1.69 | Glyma.16G187200 | disease resistance family protein/LRR family protein |
| Root | −1.54 | −1.72 | −1.14 | 1.36 | 1.51 | Glyma.09G111900 | fatty acid desaturase 2 |
| Root | 1.42 | 1.83 | 1.06 | 1.34 | 1.73 | Glyma.16G169700 | receptor like protein 27 |
| Root | −1.46 | −2.07 | −1.09 | 1.34 | 1.89 | Glyma.16G195800 | cytochrome P450, family 71, subfamily A, polypeptide 22 |
| Root | −1.37 | −1.63 | −1.04 | 1.33 | 1.57 | Glyma.17G126300 | Cysteine proteinases superfamily protein |
| Root | −1.47 | −1.95 | −1.11 | 1.32 | 1.75 | Glyma.19G213100 | Integrase-type DNA-binding superfamily protein |
| Root | −1.61 | −2.02 | −1.21 | 1.32 | 1.66 | Glyma.16G188800 | Bifunctional inhibitor/lipid-transfer protein/seed storage 2S |
| | | | | | | | albumin superfamily protein |
| Root | −1.42 | −1.67 | −1.08 | 1.32 | 1.55 | Glyma.18G072300 | Chaperone DnaJ-domain superfamily protein |
| Root | −1.39 | −1.66 | −1.06 | 1.31 | 1.57 | Glyma.16G188000 | disease resistance family protein/LRR family protein |
| Root | 1.40 | 1.85 | 1.07 | 1.31 | 1.73 | Glyma.16G174600 | disease resistance family protein/LRR family protein |
| Root | 1.33 | 1.91 | 1.02 | 1.31 | 1.87 | Glyma.16G168900 | cytochrome P450, family 707, subfamily A, polypeptide 3 |
| Root | −1.28 | −1.87 | −1.01 | 1.27 | 1.86 | Glyma.06G031000 | |
| Root | −1.37 | −1.98 | −1.10 | 1.25 | 1.81 | Glyma.18G212500 | AZA-guanine resistant1 |
| Root | 1.32 | 1.64 | 1.06 | 1.25 | 1.55 | Glyma.07G266600 | |
| Root | 1.34 | 1.72 | 1.07 | 1.24 | 1.60 | Glyma.07G074000 | Cellulase (glycosyl hydrolase family 5) protein |
| Root | 1.40 | 1.82 | 1.12 | 1.24 | 1.62 | Glyma.18G044900 | acyl activating enzyme 12 |
| Root | 1.29 | 1.68 | 1.04 | 1.24 | 1.61 | Glyma.10G154400 | glycoside hydrolase family 2 protein |
| Root | 1.39 | 1.82 | 1.13 | 1.22 | 1.61 | Glyma.18G147000 | basic helix-loop-helix (bHLH) DNA-binding superfamily |
| | | | | | | | protein |
| Root | 1.49 | 1.84 | 1.22 | 1.22 | 1.51 | Glyma.13G262400 | Carbohydrate-binding X8 domain superfamily protein |
| Root | 1.56 | 1.93 | 1.28 | 1.22 | 1.50 | Glyma.03G029400 | Plant invertase/pectin methylesterase inhibitor superfamily |
| Root | 1.24 | 1.76 | 1.02 | 1.21 | 1.71 | Glyma.16G129300 | disease resistance family protein/LRR family protein |
| Root | 1.32 | 1.69 | 1.10 | 1.20 | 1.53 | Glyma.11G004700 | Cupredoxin superfamily protein |
| Root | −1.22 | −1.65 | −1.03 | 1.18 | 1.60 | Glyma.06G042200 | |
| Root | 1.22 | 1.58 | 1.04 | 1.18 | 1.52 | Glyma.08G076200 | Vacuolar iron transporter (VIT) family protein |
| Root | 1.23 | 1.59 | 1.05 | 1.18 | 1.51 | Glyma.08G120300 | receptor-like kinase in flowers 1 |
| Root | 1.26 | 1.75 | 1.08 | 1.16 | 1.62 | Glyma.19G133400 | 2-oxoglutarate (2OG) and Fe(II)-dependent oxygenase |
| | | | | | | | superfamily protein |
| Root | 1.23 | 1.59 | 1.06 | 1.16 | 1.50 | Glyma.19G258000 | RAB GTPase homolog A3 |
| Root | 1.26 | 1.77 | 1.09 | 1.16 | 1.62 | Glyma.05G225400 | Protein of unknown function (DUF1005) |
| Root | 1.26 | 1.68 | 1.09 | 1.16 | 1.54 | Glyma.05G138100 | DNAse I-like superfamily protein |
| Root | 1.32 | 1.72 | 1.14 | 1.15 | 1.50 | Glyma.07G081700 | gibberellin 20 oxidase 2 |
| Root | 1.22 | 1.76 | 1.06 | 1.15 | 1.66 | Glyma.20G110000 | TRICHOME BIREFRINGENCE-LIKE 36 |
| Root | 1.33 | 1.78 | 1.16 | 1.15 | 1.54 | Glyma.16G189200 | Heavy metal transport/detoxification superfamily protein |
| Root | −1.20 | −1.60 | −1.04 | 1.15 | 1.53 | Glyma.08G139800 | |
| Root | 1.67 | 2.27 | 1.46 | 1.14 | 1.56 | Glyma.06G123900 | glycosyl hydrolase 9A1 |
| Root | −1.20 | −2.94 | −1.05 | 1.14 | 2.80 | Glyma.05G114100 | Protein kinase superfamily protein |
| Root | 1.20 | 1.65 | 1.05 | 1.14 | 1.57 | Glyma.06G187100 | formin 8 |
| Root | 1.24 | 1.80 | 1.09 | 1.14 | 1.65 | Glyma.06G074600 | potassium channel in Arabidopsis thaliana 3 |
| Root | 1.16 | 1.66 | 1.02 | 1.14 | 1.63 | Glyma.17G009600 | RPM1 interacting protein 4 |
| Root | 1.18 | 1.58 | 1.05 | 1.13 | 1.50 | Glyma.12G091200 | NAC domain containing protein 90 |
| Root | 1.28 | 1.79 | 1.14 | 1.12 | 1.56 | Glyma.04G123000 | |
| Root | 1.17 | 1.78 | 1.05 | 1.11 | 1.69 | Glyma.13G328900 | ROP interactive partner 5 |
| Root | 1.32 | 1.88 | 1.19 | 1.11 | 1.59 | Glyma.05G188000 | |
| Root | 1.15 | 1.65 | 1.04 | 1.11 | 1.59 | Glyma.18G040600 | O-Glycosyl hydrolases family 17 protein |
| Root | 1.21 | 1.70 | 1.09 | 1.11 | 1.56 | Glyma.06G323100 | cellulase 3 |
| Root | 1.15 | 1.57 | 1.04 | 1.11 | 1.51 | Glyma.01G221200 | PLAC8 family protein |
| Root | 1.17 | 1.67 | 1.07 | 1.10 | 1.57 | Glyma.20G043400 | serine carboxypeptidase-like 17 |
| Root | 1.24 | 1.77 | 1.13 | 1.10 | 1.57 | Glyma.06G119000 | |
| Root | −1.15 | −1.62 | −1.06 | 1.08 | 1.53 | Glyma.03G143500 | myb-like HTH transcriptional regulator family protein |
| Root | 1.16 | 1.65 | 1.08 | 1.08 | 1.54 | Glyma.20G023000 | Transducin/WD40 repeat-like superfamily protein |
| Root | 1.36 | 2.07 | 1.28 | 1.07 | 1.62 | Glyma.13G042900 | white-brown complex homolog protein 11 |
| Root | 1.13 | 1.66 | 1.06 | 1.07 | 1.57 | Glyma.01G196500 | |
| Root | 1.10 | 1.66 | 1.07 | 1.03 | 1.55 | Glyma.14G203500 | ovate family protein 17 |
| Root | 1.19 | 1.81 | 1.17 | 1.02 | 1.55 | Glyma.09G280300 | Uncharacterised protein family (UPF0497) |
| Root | 1.22 | 1.84 | 1.21 | 1.01 | 1.52 | Glyma.16G054800 | Protein of unknown function (DUF 3339) |
| Root | 1.11 | 1.66 | 1.10 | 1.00 | 1.51 | Glyma.16G178000 | Heavy metal transport/detoxification superfamily protein |
| Root | 1.28 | 1.93 | 1.29 | 1.00 | 1.50 | Glyma.05G125300 | |
| Root | 1.27 | 2.10 | 1.28 | 0.99 | 1.64 | Glyma.03G010300 | |
| Root | 1.11 | 1.72 | 1.12 | 0.99 | 1.53 | Glyma.02G067500 | nudix hydrolase homolog 12 |
| Root | −1.09 | −1.72 | −1.11 | 0.98 | 1.55 | Glyma.16G038100 | |
| Root | 1.00 | −1.56 | 1.04 | 0.97 | −1.50 | Glyma.09G075100 | RNA-binding CRS1/YhbY (CRM) domain-containing protein |
| Root | 1.04 | 1.77 | 1.08 | 0.97 | 1.64 | Glyma.04G228900 | |
| Root | 1.02 | 1.63 | 1.07 | 0.95 | 1.53 | Glyma.05G072600 | myb domain protein 40 |
| Root | −1.03 | −1.77 | −1.09 | 0.95 | 1.63 | Glyma.05G009000 | early nodulin-related |
| Root | 1.25 | 2.07 | 1.32 | 0.94 | 1.56 | Glyma.09G072000 | Integrase-type DNA-binding superfamily protein |
| Root | 1.04 | 1.71 | 1.11 | 0.94 | 1.54 | Glyma.08G248000 | O-methyltransferase family protein |
| Root | 1.06 | 1.76 | 1.17 | 0.91 | 1.51 | Glyma.13G130300 | Ankyrin repeat family protein |
| Root | 1.16 | 2.32 | 1.34 | 0.87 | 1.73 | Glyma.15G180000 | Integrase-type DNA-binding superfamily protein |
| Root | −1.01 | 1.61 | 1.06 | −0.96 | 1.52 | Glyma.19G084200 | lysine histidine transporter 1 |
| Root | −1.05 | 1.70 | 1.06 | −0.99 | 1.61 | Glyma.16G178400 | Heavy metal transport/detoxification superfamily protein |
| Root | 1.02 | 1.55 | −1.03 | −1.00 | −1.51 | Glyma.13G357600 | |
| Root | −1.03 | 1.68 | 1.01 | −1.01 | 1.65 | Glyma.06G135900 | |
| Root | 1.06 | −1.55 | −1.01 | −1.04 | 1.53 | Glyma.07G232500 | CRT (chloroquine-resistance transporter)-like transporter 3 |
| Root | 1.11 | 1.76 | −1.06 | −1.04 | −1.66 | Glyma.06G215200 | Cytochrome P450 superfamily protein |
| Root | 1.19 | 1.55 | −1.01 | −1.18 | −1.54 | Glyma.16G174400 | Leucine-rich repeat transmembrane protein kinase family |
| | | | | | | | protein |
| Root | −1.20 | −1.66 | 1.01 | −1.19 | −1.64 | Glyma.16G169200 | receptor like protein 6 |
| Root | 1.29 | 1.54 | −1.02 | −1.25 | −1.51 | Glyma.04G214900 | Transducin/WD40 repeat-like superfamily protein |
| Root | −1.34 | −1.57 | 1.01 | −1.32 | −1.55 | Glyma.U002100 | disease resistance family protein/LRR family protein |
| Root | −1.43 | −2.12 | 1.06 | −1.35 | −1.99 | Glyma.16G175500 | UDP-glucosyl transferase 88A1 |
| Root | −1.40 | −1.67 | 1.02 | −1.37 | −1.63 | Glyma.16G185900 | CAP160 protein |
| Root | −1.47 | −1.99 | 1.02 | −1.44 | −1.95 | Glyma.16G195900 | Tetratricopeptide repeat (TPR)-like superfamily protein |
| Root | −1.52 | −2.25 | 1.04 | −1.46 | −2.16 | Glyma.16G159300 | Disease resistance protein (TIR-NBS-LRR class) family |
| Root | −1.86 | −1.81 | 1.07 | −1.74 | −1.69 | Glyma.16G159200 | Disease resistance protein (TIR-NBS-LRR class) family |
| Root | −1.92 | −2.08 | −1.03 | 1.87 | 2.02 | Glyma.16G168400 | VIRE2-interacting protein 1 |
| Root | −1.83 | −2.21 | −1.03 | 1.77 | 2.14 | Glyma.16G182400 | Plant regulator RWP-RK family protein |
| Root | −1.90 | −1.36 | −1.11 | 1.72 | 1.23 | Glyma.12G132500 | UDP-Glycosyltransferase superfamily protein |
| Root | 2.54 | 2.03 | 1.49 | 1.71 | 1.37 | Glyma.06G031600 | AMP-dependent synthetase and ligase family protein |
| Root | −1.65 | −1.52 | −1.01 | 1.63 | 1.50 | Glyma.16G195600 | cytochrome P450, family 71, subfamily A, polypeptide 26 |
| Root | −1.90 | −1.42 | −1.17 | 1.62 | 1.22 | Glyma.16G175800 | Glycosyl hydrolases family 32 protein |
| Root | −1.96 | −1.66 | −1.22 | 1.60 | 1.36 | Glyma.05G095600 | Amino acid kinase family protein |
| Root | −1.71 | −1.82 | −1.10 | 1.55 | 1.65 | Glyma.16G173000 | chitinase A |
| Root | 1.56 | 1.70 | 1.03 | 1.52 | 1.66 | Glyma.16G199800 | |
| Root | 1.58 | 1.36 | 1.04 | 1.51 | 1.30 | Glyma.16G165400 | Tetratricopeptide repeat (TPR)-like superfamily protein |
| Root | −1.86 | −1.81 | 1.07 | −1.74 | −1.69 | Glyma.16G159200 | Disease resistance protein (TIR-NBS-LRR class) family |

TABLE 7F
Transcripts that are up- or down- regulated at least 1.5 fold higher or lower in the beneficial
Penicillium strain Strain A or Strain B as compared to the control Penicillium strain Strain F.

| | | | | Strain | Strain | | |
|---|---|---|---|---|---|---|---|
| | | | | B/ | A/ | | |
| | Strain | Strain | Strain | Strain | Strain | | |
| Tissue | B | A | F | F | F | Transcript Name | Transcript Description |
| Leaf | 2.44 | 2.56 | 1.14 | 2.14 | 2.24 | Glyma.16G169400.1 | receptor like protein 19 |
| Leaf | −1.81 | −2.12 | −1.02 | 1.76 | 2.07 | Glyma.16G168400.1 | VIRE2-interacting protein 1 |
| Leaf | 1.82 | 2.27 | 1.04 | 1.76 | 2.19 | Glyma.03G028300.1 | S-adenosyl-L-methionine-dependent methyltransferases |
| | | | | | | | superfamily protein |
| Leaf | 1.81 | 2.02 | 1.08 | 1.67 | 1.87 | Glyma.16G170800.1 | disease resistance family protein/LRR family protein |
| Leaf | 1.70 | 1.91 | 1.03 | 1.65 | 1.85 | Glyma.16G169900.1 | disease resistance family protein/LRR family protein |
| Leaf | 1.87 | 2.09 | 1.15 | 1.63 | 1.82 | Glyma.16G171800.1 | receptor like protein 15 |
| Leaf | −1.67 | −1.82 | −1.04 | 1.61 | 1.75 | Glyma.U044100.2 | Arabidopsis thaliana protein of unknown function (DUF821) |
| Leaf | 1.58 | 1.80 | 1.04 | 1.52 | 1.73 | Glyma.16G174600.1 | disease resistance family protein/LRR family protein |
| Leaf | −1.64 | −2.30 | −1.09 | 1.51 | 2.12 | Glyma.16G195900.1 | Tetratricopeptide repeat (TPR)-like superfamily protein |
| Leaf | 1.68 | 2.37 | 1.14 | 1.48 | 2.08 | Glyma.11G104300.1 | Phototropic-responsive NPH3 family protein |
| Leaf | 1.46 | 1.74 | 1.01 | 1.44 | 1.72 | Glyma.16G197900.5 | F-box family protein |
| Leaf | 1.49 | 1.72 | 1.04 | 1.44 | 1.66 | Glyma.16G156100.1 | leucine-rich repeat transmembrane protein kinase family protein |
| Leaf | 1.47 | 1.65 | 1.03 | 1.43 | 1.60 | Glyma.11G086600.2 | |
| Leaf | 1.46 | 1.68 | 1.03 | 1.43 | 1.64 | Glyma.U006500.1 | disease resistance family protein/LRR family protein |
| Leaf | 1.69 | 2.58 | 1.20 | 1.40 | 2.14 | Glyma.01G006500.8 | nuclear RNA polymerase C2 |
| Leaf | 1.71 | 1.88 | 1.23 | 1.39 | 1.53 | Glyma.16G170700.1 | disease resistance family protein/LRR family protein |
| Leaf | −1.53 | −1.86 | −1.11 | 1.38 | 1.68 | Glyma.20G107700.3 | GCIP-interacting family protein |
| Leaf | 1.43 | 1.66 | 1.04 | 1.37 | 1.60 | Glyma.16G171200.1 | disease resistance family protein/LRR family protein |
| Leaf | 1.44 | 1.82 | 1.05 | 1.37 | 1.73 | Glyma.16G191600.1 | Arabidopsis thaliana protein of unknown function (DUF821) |
| Leaf | −1.48 | −1.68 | −1.08 | 1.37 | 1.55 | Glyma.16G173000.1 | chitinase A |
| Leaf | 1.60 | 2.01 | 1.17 | 1.36 | 1.71 | Glyma.03G046400.2 | prenylated RAB acceptor 1.B4 |
| Leaf | −1.36 | −1.54 | −1.00 | 1.36 | 1.54 | Glyma.16G188100.1 | disease resistance family protein/LRR family protein |
| Leaf | 1.40 | 1.54 | 1.03 | 1.36 | 1.50 | Glyma.16G106200.1 | disease resistance family protein/LRR family protein |
| Leaf | 1.49 | 1.73 | 1.13 | 1.32 | 1.53 | Glyma.16G172500.2 | multidrug resistance-associated protein 14 |
| Leaf | 1.32 | 1.74 | 1.01 | 1.30 | 1.71 | Glyma.16G169700.1 | receptor like protein 27 |
| Leaf | 1.37 | 1.62 | 1.07 | 1.28 | 1.51 | Glyma.17G249800.2 | |
| Leaf | 1.61 | 2.01 | 1.26 | 1.27 | 1.59 | Glyma.16G172600.1 | multidrug resistance-associated protein 14 |
| Leaf | −1.56 | −1.90 | −1.24 | 1.26 | 1.53 | Glyma.05G184500.1 | WRKY DNA-binding protein 51 |
| Leaf | −1.29 | −2.38 | −1.03 | 1.26 | 2.32 | Glyma.07G238000.2 | WRKY DNA-binding protein 23 |
| Leaf | 1.40 | 2.01 | 1.11 | 1.26 | 1.81 | Glyma.16G169600.1 | receptor like protein 6 |
| Leaf | 1.25 | 1.54 | 1.00 | 1.25 | 1.54 | Glyma.20G112800.2 | kow domain-containing transcription factor 1 |
| Leaf | 1.31 | 1.65 | 1.06 | 1.24 | 1.57 | Glyma.09G272300.7 | Leucine-rich repeat protein kinase family protein |
| Leaf | 1.39 | 1.86 | 1.12 | 1.24 | 1.65 | Glyma.13G223000.1 | GDSL-like Lipase/Acylhydrolase superfamily protein |
| Leaf | −1.29 | −1.63 | −1.05 | 1.22 | 1.54 | Glyma.13G232600.2 | nudix hydrolase homolog 15 |
| Leaf | −1.36 | −2.15 | −1.12 | 1.21 | 1.92 | Glyma.02G258000.1 | Plant protein of unknown function (DUF828) |
| Leaf | −1.59 | −2.00 | −1.32 | 1.21 | 1.52 | Glyma.09G044000.2 | Heat shock protein DnaJ, N-terminal with domain of unknown |
| | | | | | | | function (DUF1977) |
| Leaf | −1.25 | −1.57 | −1.04 | 1.20 | 1.50 | Glyma.08G019800.2 | |
| Leaf | 1.32 | 1.68 | 1.11 | 1.19 | 1.52 | Glyma.06G313600.4 | zinc induced facilitator-like 1 |
| Leaf | −1.39 | −2.00 | −1.19 | 1.17 | 1.69 | Glyma.03G264600.3 | RNA-binding protein |
| Leaf | −1.21 | −1.55 | −1.03 | 1.17 | 1.51 | Glyma.06G305900.1 | Polynucleotidyl transferase, ribonuclease H fold protein with |
| | | | | | | | HRDC domain |
| Leaf | 1.27 | 1.70 | 1.08 | 1.17 | 1.57 | Glyma.19G240400.1 | copper/zinc superoxide dismutase 1 |
| Leaf | −1.36 | −1.76 | −1.16 | 1.17 | 1.52 | Glyma.06G196200.2 | CCT motif -containing response regulator protein |
| Leaf | 1.22 | 1.83 | 1.06 | 1.15 | 1.73 | Glyma.16G138400.1 | RAD-like 6 |
| Leaf | −1.19 | −1.68 | −1.04 | 1.15 | 1.62 | Glyma.10G166000.3 | threonine aldolase 1 |
| Leaf | −1.34 | −1.89 | −1.20 | 1.12 | 1.58 | Glyma.03G166800.1 | SET-domain containing protein lysine methyltransferase family |
| | | | | | | | protein |
| Leaf | 1.18 | 1.60 | 1.06 | 1.12 | 1.52 | Glyma.02G183500.2 | Protein kinase superfamily protein |
| Leaf | 1.14 | 1.59 | 1.03 | 1.11 | 1.54 | Glyma.15G074000.3 | glucan synthase-like 1 |
| Leaf | −1.14 | −1.57 | −1.04 | 1.10 | 1.51 | Glyma.17G137200.1 | Nucleotide-sugar transporter family protein |
| Leaf | −1.23 | −1.70 | −1.12 | 1.10 | 1.52 | Glyma.16G132600.4 | folate transporter 1 |
| Leaf | 1.22 | 1.76 | 1.11 | 1.10 | 1.59 | Glyma.02G288600.1 | Leucine-rich repeat transmembrane protein kinase |
| Leaf | −1.11 | 1.68 | −1.03 | 1.08 | −1.64 | Glyma.09G054100.4 | Ankyrin repeat family protein |
| Leaf | −1.17 | −3.08 | −1.09 | 1.08 | 2.83 | Glyma.05G207400.3 | Protein kinase protein with tetratricopeptide repeat domain |
| Leaf | 1.15 | 2.10 | 1.07 | 1.08 | 1.97 | Glyma.05G091800.4 | Plant protein of unknown function (DUF869) |
| Leaf | 1.09 | −1.55 | 1.01 | 1.08 | −1.53 | Glyma.13G213400.2 | squamosa promoter binding protein-like 7 |
| Leaf | 1.09 | 1.67 | 1.02 | 1.08 | 1.65 | Glyma.03G176600.5 | WRKY family transcription factor family protein |
| Leaf | 1.15 | 4.98 | 1.07 | 1.08 | 4.66 | Glyma.15G167100.7 | |
| Leaf | −1.16 | −1.69 | −1.08 | 1.07 | 1.56 | Glyma.07G189000.1 | Octicosapeptide/Phox/Bem1p family protein |
| Leaf | −1.10 | −1.55 | −1.03 | 1.07 | 1.51 | Glyma.14G153000.2 | SWITCH/sucrose nonfermenting 3C |
| Leaf | −1.17 | −1.92 | −1.10 | 1.07 | 1.75 | Glyma.15G124400.3 | SNARE associated Golgi protein family |
| Leaf | 1.22 | 1.73 | 1.14 | 1.07 | 1.51 | Glyma.09G055700.1 | Protein kinase superfamily protein |
| Leaf | −1.11 | −1.61 | −1.05 | 1.06 | 1.53 | Glyma.14G100200.1 | |
| Leaf | 1.05 | −1.69 | 1.01 | 1.05 | −1.68 | Glyma.U007400.1 | |
| Leaf | −1.08 | −1.66 | −1.04 | 1.04 | 1.60 | Glyma.03G202400.4 | BTB/POZ domain-containing protein |
| Leaf | −1.10 | −1.62 | −1.06 | 1.04 | 1.53 | Glyma.01G126600.1 | Disease resistance-responsive (dirigent-like protein) family |
| | | | | | | | protein |
| Leaf | 1.04 | −1.52 | 1.00 | 1.04 | −1.52 | Glyma.08G154000.1 | hAT dimerisation domain-containing protein |
| Leaf | 1.09 | 1.62 | 1.05 | 1.04 | 1.55 | Glyma.04G076500.2 | Cellulose-synthase-like C5 |
| Leaf | −1.16 | −1.81 | −1.12 | 1.04 | 1.62 | Glyma.15G251100.2 | ubiquitin-specific protease 25 |
| Leaf | −1.16 | −2.77 | −1.12 | 1.04 | 2.48 | Glyma.12G211300.3 | Protein of unknown function (DUF688) |
| Leaf | −1.17 | −2.14 | −1.13 | 1.04 | 1.90 | Glyma.08G073700.2 | Polymerase/histidinol phosphatase-like |
| Leaf | 1.04 | 1.52 | 1.01 | 1.03 | 1.51 | Glyma.15G092400.5 | multidrug resistance-associated protein 2 |
| Leaf | −1.07 | −5.38 | −1.04 | 1.03 | 5.16 | Glyma.17G170900.7 | PLC-like phosphodiesterases superfamily protein |
| Leaf | 1.10 | 1.64 | 1.08 | 1.03 | 1.53 | Glyma.11G248400.6 | FAD/NAD(P)-binding oxidoreductase family protein |
| Leaf | 1.14 | 1.86 | 1.11 | 1.03 | 1.67 | Glyma.20G173200.3 | FORMS APLOID AND BINUCLEATE CELLS 1A |
| Leaf | −1.07 | −2.83 | −1.05 | 1.02 | 2.70 | Glyma.01G099800.2 | delta 1-pyrroline-5-carboxylate synthase 2 |
| Leaf | −1.05 | −1.54 | −1.02 | 1.02 | 1.51 | Glyma.12G095300.5 | BRI1 suppressor 1 (BSU1)-like 2 |
| Leaf | −1.06 | −1.59 | −1.03 | 1.02 | 1.54 | Glyma.05G084500.1 | |
| Leaf | 1.05 | −1.58 | 1.03 | 1.02 | −1.54 | Glyma.14G063700.1 | HSP20-like chaperones superfamily protein |
| Leaf | −1.06 | −1.74 | −1.05 | 1.01 | 1.66 | Glyma.05G081200.1 | |
| Leaf | 1.11 | 1.78 | 1.11 | 1.01 | 1.61 | Glyma.14G195200.3 | Protein phosphatase 2C family protein |
| Leaf | −1.12 | −3.13 | −1.11 | 1.01 | 2.81 | Glyma.04G165100.1 | Plant protein of unknown function (DUF863) |
| Leaf | −1.07 | −1.77 | −1.06 | 1.01 | 1.67 | Glyma.16G093800.17 | Helicase/SANT-associated, DNA binding protein |
| Leaf | 1.04 | 3.66 | 1.04 | 1.01 | 3.54 | Glyma.15G111700.1 | Ribosomal protein L4/L1 family |
| Leaf | −1.19 | −1.78 | −1.18 | 1.00 | 1.51 | Glyma.20G116300.2 | Regulator of Vps4 activity in the MVB pathway protein |
| Leaf | 1.03 | 1.71 | 1.03 | 1.00 | 1.66 | Glyma.20G062200.4 | homolog of yeast ADA2 2A |
| Leaf | −1.08 | −1.72 | −1.08 | 1.00 | 1.60 | Glyma.12G128700.2 | Mitogen activated protein kinase kinase kinase-related |
| Leaf | 1.04 | −1.81 | 1.04 | 1.00 | −1.75 | Glyma.13G012200.1 | |
| Leaf | 1.02 | 1.62 | 1.02 | 1.00 | 1.58 | Glyma.20G122300.1 | 2-oxoglutarate (2OG) and Fe(II)-dependent oxygenase |
| | | | | | | | superfamily protein |
| Leaf | −1.14 | −1.90 | −1.14 | 1.00 | 1.66 | Glyma.12G084000.2 | Lecithin:cholesterol acyltransferase family protein |
| Leaf | −1.16 | −1.88 | −1.16 | 1.00 | 1.62 | Glyma.04G256800.3 | P-loop containing nucleoside triphosphate hydrolases |
| | | | | | | | superfamily protein |
| Leaf | −1.21 | −2.57 | −1.21 | 1.00 | 2.12 | Glyma.17G098900.2 | basic helix-loop-helix (bHLH) DNA-binding superfamily protein |
| Leaf | 1.04 | 3.51 | 1.04 | 1.00 | 3.38 | Glyma.12G225400.2 | embryo defective 2737 |
| Leaf | 1.03 | 1.76 | 1.04 | 1.00 | 1.70 | Glyma.U011100.4 | Protein of unknown function (DUF1997) |
| Leaf | 1.01 | −1.77 | 1.01 | 1.00 | −1.75 | Glyma.13G024200.1 | |
| Leaf | 1.02 | −1.75 | 1.03 | 1.00 | −1.71 | Glyma.13G020800.1 | |
| Leaf | 1.01 | −1.77 | 1.01 | 1.00 | −1.75 | Glyma.13G018100.1 | |
| Leaf | 1.23 | 1.87 | 1.23 | 0.99 | 1.52 | Glyma.05G067400.3 | Zinc-binding ribosomal protein family protein |
| Leaf | 1.02 | −1.78 | 1.02 | 0.99 | −1.74 | Glyma.U005800.1 | |
| Leaf | 1.03 | 1.56 | 1.04 | 0.99 | 1.50 | Glyma.17G258000.3 | |
| Leaf | 1.03 | −1.78 | 1.04 | 0.99 | −1.72 | Glyma.13G021800.1 | |
| Leaf | −1.03 | −1.73 | −1.04 | 0.99 | 1.67 | Glyma.08G041700.4 | CRS1/YhbY (CRM) domain-containing protein |
| Leaf | −1.12 | −1.72 | −1.13 | 0.99 | 1.52 | Glyma.17G203800.2 | RING/U-box superfamily protein |
| Leaf | 1.02 | −1.74 | 1.03 | 0.99 | −1.69 | Glyma.13G011200.1 | |
| Leaf | 1.02 | 1.78 | 1.03 | 0.99 | 1.73 | Glyma.13G317500.1 | homolog of histone chaperone HIRA |
| Leaf | 1.13 | 1.78 | 1.15 | 0.99 | 1.55 | Glyma.02G262200.1 | Glycosyl hydrolase family 85 |
| Leaf | 1.05 | 1.67 | 1.06 | 0.98 | 1.57 | Glyma.20G133100.3 | Phototropic-responsive NPH3 family protein |
| Leaf | 1.05 | 2.57 | 1.07 | 0.98 | 2.41 | Glyma.05G131800.3 | K+ uptake permease 11 |
| Leaf | −1.05 | −1.63 | −1.07 | 0.98 | 1.52 | Glyma.09G133900.1 | |
| Leaf | 1.04 | 2.48 | 1.07 | 0.98 | 2.33 | Glyma.03G195300.3 | |
| Leaf | 1.04 | 2.40 | 1.07 | 0.98 | 2.25 | Glyma.15G178400.5 | aldehyde dehydrogenase 7B4 |
| Leaf | −1.12 | −2.27 | −1.14 | 0.98 | 1.98 | Glyma.01G052500.4 | O-fucosyltransferase family protein |
| Leaf | 1.04 | 2.22 | 1.07 | 0.98 | 2.08 | Glyma.11G211100.1 | Leucine-rich repeat protein kinase family protein |
| Leaf | −1.10 | −5.14 | −1.13 | 0.98 | 4.56 | Glyma.20G156500.2 | Homeobox-leucine zipper family protein/lipid-binding START |
| | | | | | | | domain-containing protein |
| Leaf | 1.03 | 1.79 | 1.06 | 0.98 | 1.69 | Glyma.01G221700.3 | Nuclear transport factor 2 (NTF2) family protein |
| Leaf | −1.01 | −1.67 | −1.04 | 0.97 | 1.60 | Glyma.01G163400.1 | |
| Leaf | 1.04 | 1.75 | 1.07 | 0.97 | 1.64 | Glyma.06G213300.3 | Stabilizer of iron transporter SufD/Polynucleotidyl transferase |
| Leaf | 1.10 | 1.74 | 1.14 | 0.97 | 1.53 | Glyma.13G053600.1 | Malectin/receptor-like protein kinase family protein |
| Leaf | −1.05 | −3.72 | −1.09 | 0.97 | 3.42 | Glyma.17G126200.1 | Transducin/WD40 repeat-like superfamily protein |
| Leaf | −1.08 | −2.28 | −1.11 | 0.97 | 2.05 | Glyma.01G215800.3 | Pleckstrin homology (PH) domain superfamily protein |
| Leaf | 1.13 | 1.84 | 1.17 | 0.96 | 1.57 | Glyma.10G034100.3 | IND1(iron-sulfur protein required for NADH dehydrogenase)-like |
| Leaf | −1.00 | −1.62 | −1.04 | 0.96 | 1.55 | Glyma.09G164000.1 | |
| Leaf | 1.11 | 1.77 | 1.16 | 0.96 | 1.52 | Glyma.02G101300.1 | Cytochrome b561/ferric reductase transmembrane protein |
| | | | | | | | family |
| Leaf | 1.02 | 1.62 | 1.07 | 0.96 | 1.52 | Glyma.18G001900.3 | |
| Leaf | −1.02 | −1.68 | −1.07 | 0.96 | 1.57 | Glyma.08G269900.1 | |
| Leaf | 1.07 | 1.70 | 1.12 | 0.95 | 1.51 | Glyma.02G228200.2 | Protein phosphatase 2C family protein |
| Leaf | 1.01 | −1.81 | 1.08 | 0.94 | −1.68 | Glyma.13G015400.1 | |
| Leaf | −1.32 | −3.08 | −1.41 | 0.93 | 2.18 | Glyma.01G013600.1 | basic region/leucine zipper transcription factor 16 |
| Leaf | −1.05 | 1.83 | −1.12 | 0.93 | −1.63 | Glyma.19G027200.2 | U-box domain-containing protein |
| Leaf | 1.00 | −1.68 | 1.08 | 0.93 | −1.56 | Glyma.13G015600.1 | |
| Leaf | −1.06 | −1.80 | −1.15 | 0.93 | 1.57 | Glyma.05G174800.3 | Protein of unknown function (DUF707) |
| Leaf | 1.05 | 4.33 | 1.19 | 0.88 | 3.63 | Glyma.02G035800.1 | SBP (S-ribonuclease binding protein) family protein |
| Leaf | 1.05 | 6.03 | 1.20 | 0.87 | 5.01 | Glyma.07G144800.2 | Transducin/WD40 repeat-like superfamily protein |
| Leaf | 1.02 | 1.80 | 1.18 | 0.86 | 1.53 | Glyma.03G015800.1 | BON association protein 2 |
| Leaf | 1.01 | 2.17 | 1.20 | 0.85 | 1.82 | Glyma.20G017100.2 | sulfate transporter 91 |
| Leaf | 1.06 | 2.17 | 1.27 | 0.84 | 1.72 | Glyma.04G212600.1 | |
| Leaf | −1.11 | −2.30 | −1.43 | 0.78 | 1.61 | Glyma.19G250900.7 | |
| Leaf | 1.03 | −1.86 | −1.15 | −0.90 | 1.63 | Glyma.08G220800.2 | ARIA-interacting double AP2 domain protein |
| Leaf | 1.00 | −1.64 | −1.09 | −0.92 | 1.51 | Glyma.08G211300.3 | O-fucosyltransferase family protein |
| Leaf | −1.01 | 1.64 | 1.09 | −0.92 | 1.50 | Glyma.02G218100.3 | indole-3-acetic acid inducible 9 |
| Leaf | −1.03 | 1.69 | 1.09 | −0.95 | 1.56 | Glyma.11G080500.2 | RING/U-box superfamily protein |
| Leaf | −1.02 | −1.75 | 1.05 | −0.97 | −1.66 | Glyma.13G024100.1 | |
| Leaf | −1.00 | −1.75 | 1.04 | −0.97 | −1.69 | Glyma.13G013600.1 | |
| Leaf | 1.00 | −1.72 | −1.02 | −0.98 | 1.67 | Glyma.13G023200.1 | |
| Leaf | −1.07 | −1.72 | 1.08 | −0.99 | −1.60 | Glyma.06G289600.5 | Peptidase family M48 family protein |
| Leaf | −1.01 | −1.66 | 1.03 | −0.99 | −1.62 | Glyma.18G097000.5 | peptidemethionine sulfoxide reductase 3 |
| Leaf | 1.02 | 1.55 | −1.03 | −0.99 | −1.51 | Glyma.08G326200.1 | multidrug resistance-associated protein 3 |
| Leaf | −1.03 | −1.59 | 1.04 | −0.99 | −1.53 | Glyma.13G021100.1 | |
| Leaf | 1.07 | −1.68 | −1.07 | −1.00 | 1.57 | Glyma.13G022700.1 | |
| Leaf | −1.02 | −1.52 | 1.01 | −1.01 | −1.51 | Glyma.07G079100.1 | |
| Leaf | 1.02 | −1.57 | −1.01 | −1.01 | 1.56 | Glyma.13G015000.1 | |
| Leaf | 1.08 | 2.76 | −1.07 | −1.02 | −2.59 | Glyma.12G040400.13 | ARM repeat superfamily protein |
| Leaf | −1.05 | 1.69 | 1.03 | −1.02 | 1.63 | Glyma.01G177700.6 | aminopeptidase P1 |
| Leaf | 1.05 | 1.67 | −1.02 | −1.03 | −1.64 | Glyma.05G175000.2 | beta-1,4-N-acetylglucosaminyltransferase family protein |
| Leaf | 1.08 | 1.66 | −1.05 | −1.03 | −1.59 | Glyma.13G029700.2 | GDA1/CD39 nucleoside phosphatase family protein |
| Leaf | −1.04 | −1.80 | 1.00 | −1.04 | −1.79 | Glyma.08G060600.2 | Pentatricopeptide repeat (PPR) superfamily protein |
| Leaf | −1.07 | −1.56 | 1.03 | −1.04 | −1.51 | Glyma.U007200.1 | |
| Leaf | 1.09 | 1.65 | −1.05 | −1.04 | −1.58 | Glyma.01G149300.1 | S-adenosyl-L-methionine-dependent methyltransferases |
| | | | | | | | superfamily protein |
| Leaf | −1.17 | −1.67 | 1.11 | −1.05 | −1.51 | Glyma.01G080700.6 | NAD(P)-binding Rossmann-fold superfamily protein |
| Leaf | −1.10 | 1.61 | 1.04 | −1.06 | 1.55 | Glyma.08G114800.3 | Peptidyl-tRNA hydrolase family protein |
| Leaf | 1.09 | 1.56 | −1.03 | −1.06 | −1.50 | Glyma.02G026200.1 | NB-ARC domain-containing disease resistance protein |
| Leaf | −1.13 | 1.61 | 1.07 | −1.06 | 1.51 | Glyma.07G069400.2 | transcription regulatory protein SNF2, putative |
| Leaf | 1.07 | 1.99 | −1.00 | −1.07 | −1.98 | Glyma.11G144800.5 | Protein kinase superfamily protein |
| Leaf | −1.11 | −1.57 | 1.04 | −1.07 | −1.52 | Glyma.18G038600.1 | pfkB-like carbohydrate kinase family protein |
| Leaf | 1.09 | 1.57 | −1.02 | −1.07 | −1.54 | Glyma.19G165500.4 | Transcription factor jumonji (jmj) family protein/zinc finger |
| | | | | | | | (C5HC2 type) family protein |
| Leaf | −1.13 | −2.01 | 1.04 | −1.08 | −1.93 | Glyma.10G102200.3 | |
| Leaf | 1.15 | −1.67 | −1.06 | −1.09 | 1.59 | Glyma.13G014300.1 | |
| Leaf | −1.19 | 1.63 | 1.08 | −1.10 | 1.50 | Glyma.12G209700.7 | |
| Leaf | 1.23 | 1.65 | −1.10 | −1.12 | −1.51 | Glyma.13G321100.1 | terpene synthase 03 |
| Leaf | −1.13 | −1.68 | 1.01 | −1.12 | −1.67 | Glyma.16G186700.1 | disease resistance family protein/LRR family protein |
| Leaf | 1.13 | 1.66 | −1.00 | −1.13 | −1.66 | Glyma.11G077300.2 | calcium-dependent protein kinase 28 |
| Leaf | 1.25 | 1.76 | −1.09 | −1.15 | −1.62 | Glyma.01G192400.5 | |
| Leaf | −1.16 | −1.54 | 1.00 | −1.16 | −1.54 | Glyma.10G221400.4 | carboxypeptidase D, putative |
| Leaf | 1.18 | 1.55 | −1.01 | −1.18 | −1.54 | Glyma.12G124100.1 | SAUR-like auxin-responsive protein family |
| Leaf | 1.26 | 1.60 | −1.03 | −1.22 | −1.55 | Glyma.16G174100.1 | disease resistance family protein/LRR family protein |
| Leaf | −1.31 | −1.72 | 1.03 | −1.26 | −1.66 | Glyma.19G191900.2 | ENTH/VHS family protein |
| Leaf | −1.35 | −1.55 | 1.03 | −1.31 | −1.51 | Glyma.02G184200.1 | UDP-Glycosyltransferase superfamily protein |
| Leaf | 1.41 | 1.73 | −1.02 | −1.38 | −1.70 | Glyma.16G174800.1 | disease resistance family protein/LRR family protein |
| Leaf | 1.53 | 1.53 | −1.01 | −1.51 | −1.51 | Glyma.16G171600.1 | receptor like protein 46 |
| Leaf | 1.55 | 1.72 | −1.03 | −1.51 | −1.66 | Glyma.16G158400.2 | Laccase/Diphenol oxidase family protein |
| Leaf | 1.52 | 1.60 | −1.00 | −1.52 | −1.59 | Glyma.16G197500.1 | 2-oxoglutarate (2OG) and Fe(II)-dependent oxygenase |
| | | | | | | | superfamily protein |
| Leaf | 1.66 | 1.84 | −1.07 | −1.55 | −1.72 | Glyma.14G223100.4 | Ubiquitin-like superfamily protein |
| Leaf | −1.63 | −2.08 | 1.03 | −1.58 | −2.02 | Glyma.16G174300.1 | disease resistance family protein/LRR family protein |
| Leaf | −1.60 | −1.85 | 1.01 | −1.58 | −1.83 | Glyma.16G183100.1 | Bifunctional inhibitor/lipid-transfer protein/seed storage 2S |
| | | | | | | | albumin superfamily protein |
| Leaf | −1.65 | −1.98 | 1.03 | −1.59 | −1.92 | Glyma.16G175000.1 | disease resistance family protein/LRR family protein |
| Leaf | 1.62 | 1.58 | −1.00 | −1.61 | −1.57 | Glyma.01G084500.1 | Plasma-membrane choline transporter family protein |
| Leaf | 1.68 | 1.95 | −1.01 | −1.66 | −1.93 | Glyma.16G187100.1 | disease resistance family protein/LRR family protein |
| Leaf | 1.55 | 1.27 | −1.03 | −1.50 | −1.23 | Glyma.15G083100.4 | peroxin 7 |
| Leaf | 1.64 | 1.26 | −1.09 | −1.50 | −1.16 | Glyma.16G126100.1 | disease resistance family protein/LRR family protein |
| Leaf | 1.53 | 1.53 | −1.01 | −1.51 | −1.51 | Glyma.16G171600.1 | receptor like protein 46 |
| Leaf | 1.55 | 1.72 | −1.03 | −1.51 | −1.66 | Glyma.16G158400.2 | Laccase/Diphenol oxidase family protein |
| Leaf | 1.52 | 1.60 | −1.00 | −1.52 | −1.59 | Glyma.16G197500.1 | 2-oxoglutarate (2OG) and Fe(II)-dependent oxygenase |
| | | | | | | | superfamily protein |
| Leaf | −1.63 | −1.54 | 1.07 | −1.52 | −1.44 | Glyma.16G182400.1 | Plant regulator RWP-RK family protein |
| Leaf | 1.66 | 1.84 | −1.07 | −1.55 | −1.72 | Glyma.14G223100.4 | Ubiquitin-like superfamily protein |
| Leaf | 1.64 | 1.36 | −1.05 | −1.56 | −1.30 | Glyma.U029000.3 | pre-mRNA-processing protein 40A |
| Leaf | 1.62 | 1.45 | −1.03 | −1.56 | −1.40 | Glyma.08G222100.1 | Ribosomal protein L30/L7 family protein |
| Leaf | −1.68 | −1.54 | 1.07 | −1.56 | −1.44 | Glyma.16G159300.1 | Disease resistance protein (TIR-NBS-LRR class) family |
| Leaf | 1.63 | 1.02 | −1.03 | −1.58 | −0.99 | Glyma.1OG175300.5 | |
| Leaf | −1.63 | −2.08 | 1.03 | −1.58 | −2.02 | Glyma.16G174300.1 | disease resistance family protein/LRR family protein |
| Leaf | −1.60 | −1.85 | 1.01 | −1.58 | −1.83 | Glyma.16G183100.1 | Bifunctional inhibitor/lipid-transfer protein/seed storage 2S |
| | | | | | | | albumin superfamily protein |
| Leaf | −1.68 | −1.34 | 1.06 | −1.59 | −1.27 | Glyma.01G137500.1 | SAUR-like auxin-responsive protein family |
| Leaf | −1.65 | −1.98 | 1.03 | −1.59 | −1.92 | Glyma.16G175000.1 | disease resistance family protein/LRR family protein |
| Leaf | 1.62 | 1.58 | −1.00 | −1.61 | −1.57 | Glyma.01G084500.1 | Plasma-membrane choline transporter family protein |
| Leaf | 1.68 | 1.95 | −1.01 | −1.66 | −1.93 | Glyma.16G187100.1 | disease resistance family protein/LRR family protein |
| Leaf | −1.70 | −1.09 | 1.02 | −1.67 | −1.07 | Glyma.06G009800.1 | myo-inositol monophosphatase like 2 |
| Leaf | −1.81 | 1.29 | 1.04 | −1.75 | 1.25 | Glyma.13G216400.3 | Galactose oxidase/kelch repeat superfamily protein |
| Leaf | −1.99 | −1.10 | 1.06 | −1.87 | −1.03 | Glyma.13G359600.1 | Pentatricopeptide repeat (PPR-like) superfamily protein |
| Leaf | −1.99 | 1.11 | 1.00 | −1.99 | 1.11 | Glyma.09G213200.1 | |
| Leaf | −2.31 | 1.48 | 1.11 | −2.08 | 1.33 | Glyma.19G013200.2 | senescence-associated gene 101 |
| Leaf | −2.51 | −1.09 | 1.01 | −2.48 | −1.08 | Glyma.02G162300.8 | protein kinase family protein/protein phosphatase 2C (PP2C) |
| | | | | | | | family protein |
| Root | 4.07 | 4.76 | 1.06 | 3.83 | 4.49 | Glyma.08G196700.6 | |
| Root | 4.46 | 3.72 | 1.23 | 3.62 | 3.02 | Glyma.08G047900.3 | Protein of unknown function (DUF1712) |
| Root | −4.00 | −5.20 | −1.24 | 3.21 | 4.17 | Glyma.14G098000.3 | G protein alpha subunit 1 |
| Root | 2.95 | 4.37 | 1.07 | 2.76 | 4.08 | Glyma.05G018500.5 | galacturonosyltransferase 11 |
| Root | 3.16 | 4.59 | 1.15 | 2.76 | 4.00 | Glyma.13G152800.2 | |
| Root | 2.10 | 1.93 | 1.03 | 2.04 | 1.87 | Glyma.03G226200.1 | |
| Root | 2.14 | 4.13 | 1.06 | 2.02 | 3.89 | Glyma.16G105400.1 | tetratricopeptide repeat (TPR)-containing protein |
| Root | 2.39 | 2.63 | 1.20 | 1.99 | 2.19 | Glyma.01G197900.1 | basic helix-loop-helix (bHLH) DNA-binding superfamily protein |
| Root | 2.01 | 1.59 | 1.04 | 1.93 | 1.53 | Glyma.04G254800.2 | TGA1A-related gene 3 |
| Root | −1.93 | −2.01 | −1.03 | 1.88 | 1.96 | Glyma.16G168400.1 | VIRE2-interacting protein 1 |
| Root | 2.20 | 2.51 | 1.23 | 1.79 | 2.05 | Glyma.16G173600.4 | SLAC1 homologue 3 |
| Root | 2.13 | 3.05 | 1.22 | 1.75 | 2.51 | Glyma.08G005500.2 | |
| Root | −2.02 | −1.82 | −1.18 | 1.71 | 1.54 | Glyma.01G152500.5 | |
| Root | −1.74 | −1.96 | −1.03 | 1.69 | 1.91 | Glyma.16G182400.1 | Plant regulator RWP-RK family protein |
| Root | −1.66 | −1.97 | −1.01 | 1.65 | 1.96 | Glyma.16G195900.1 | Tetratricopeptide repeat (TPR)-like superfamily protein |
| Root | 1.95 | 3.99 | 1.19 | 1.64 | 3.36 | Glyma.09G249300.3 | Eukaryotic aspartyl protease family protein |
| Root | −1.93 | −3.83 | −1.20 | 1.62 | 3.20 | Glyma.13G337100.2 | TRF-like 2 |
| Root | −1.70 | −1.75 | −1.09 | 1.56 | 1.60 | Glyma.16G173000.1 | chitinase A |
| Root | −1.58 | −1.89 | −1.03 | 1.54 | 1.84 | Glyma.16G187200.1 | disease resistance family protein/LRR family protein |
| Root | −1.61 | −1.81 | −1.05 | 1.54 | 1.73 | Glyma.09G233200.3 | nucleotide-sensitive chloride conductance regulator (ICln) family |
| | | | | | | | protein |
| Root | −1.75 | −2.03 | −1.14 | 1.53 | 1.78 | Glyma.16G195700.1 | Tetratricopeptide repeat (TPR)-like superfamily protein |
| Root | 1.54 | 1.66 | 1.01 | 1.53 | 1.65 | Glyma.16G199800.1 | |
| Root | 1.52 | 1.55 | 1.00 | 1.51 | 1.54 | Glyma.09G146100.1 | SEUSS-like 1 |
| Root | −1.65 | −1.83 | −1.11 | 1.49 | 1.65 | Glyma.04G100600.2 | RNA-binding (RRM/RBD/RNP motifs) family protein |
| Root | 1.69 | 1.74 | 1.16 | 1.46 | 1.50 | Glyma.07G018200.2 | photosystem II 11 kDa protein-related |
| Root | 1.48 | 1.61 | 1.03 | 1.43 | 1.56 | Glyma.16G189900.1 | CAP160 protein |
| Root | 1.47 | 1.61 | 1.04 | 1.41 | 1.55 | Glyma.08G364200.1 | HEAT repeat-containing protein |
| Root | −1.83 | −2.15 | −1.31 | 1.40 | 1.64 | Glyma.04G199400.9 | |
| Root | −1.40 | −1.54 | −1.01 | 1.39 | 1.53 | Glyma.11G222900.2 | BTB/POZ/MATH-domains containing protein |
| Root | −1.48 | −1.93 | −1.07 | 1.39 | 1.81 | Glyma.10G159500.2 | ARM repeat superfamily protein |
| Root | −1.38 | −1.81 | −1.00 | 1.38 | 1.81 | Glyma.16G155600.3 | decapping 2 |
| Root | 1.62 | 1.83 | 1.20 | 1.35 | 1.52 | Glyma.20G192100.1 | OPC-8:0 CoA ligase1 |
| Root | 1.39 | 1.66 | 1.04 | 1.34 | 1.60 | Glyma.16G169700.1 | receptor like protein 27 |
| Root | 1.34 | 1.97 | 1.01 | 1.33 | 1.95 | Glyma.14G059200.2 | phospholipase C 2 |
| Root | 1.35 | 1.60 | 1.01 | 1.33 | 1.57 | Glyma.16G174800.1 | disease resistance family protein/LRR family protein |
| Root | −1.41 | −1.63 | −1.07 | 1.32 | 1.52 | Glyma.18G072300.1 | Chaperone DnaJ-domain superfamily protein |
| Root | 1.40 | 1.68 | 1.07 | 1.31 | 1.57 | Glyma.18G043200.1 | TPX2 (targeting protein for Xklp2) protein family |
| Root | 1.33 | 1.53 | 1.02 | 1.31 | 1.50 | Glyma.16G129300.1 | disease resistance family protein/LRR family protein |
| Root | −1.40 | −2.20 | −1.08 | 1.29 | 2.04 | Glyma.16G155700.1 | glutathione-disulfide reductase |
| Root | −1.44 | −1.74 | −1.12 | 1.29 | 1.55 | Glyma.02G174100.3 | SNF2 domain-containing protein/helicase domain-containing |
| | | | | | | | protein |
| Root | 1.30 | 2.23 | 1.01 | 1.29 | 2.21 | Glyma.09G230700.2 | RNA polymerase III RPC4 |
| Root | 1.39 | 1.82 | 1.09 | 1.27 | 1.67 | Glyma.08G120300.1 | receptor-like kinase in flowers 1 |
| Root | 1.31 | 1.71 | 1.03 | 1.27 | 1.65 | Glyma.17G070100.1 | Eukaryotic aspartyl protease family protein |
| Root | 1.45 | 1.79 | 1.14 | 1.27 | 1.56 | Glyma.13G129700.2 | Protein of unknown function (DUF3741) |
| Root | −1.38 | −2.00 | −1.09 | 1.27 | 1.83 | Glyma.18G212500.1 | AZA-guanine resistant1 |
| Root | −1.46 | −1.83 | −1.16 | 1.26 | 1.58 | Glyma.19G213100.1 | Integrase-type DNA-binding superfamily protein |
| Root | −1.26 | −1.75 | −1.01 | 1.25 | 1.73 | Glyma.06G031000.1 | |
| Root | 1.33 | 1.93 | 1.06 | 1.25 | 1.82 | Glyma.06G201000.1 | exocyst subunit exo70 family protein B1 |
| Root | 1.44 | 2.45 | 1.15 | 1.25 | 2.12 | Glyma.13G156600.1 | Protein of unknown function (DUF1336) |
| Root | 1.85 | 2.33 | 1.50 | 1.24 | 1.56 | Glyma.14G218100.2 | Putative lysine decarboxylase family protein |
| Root | −1.24 | −2.05 | −1.01 | 1.23 | 2.03 | Glyma.17G129100.2 | |
| Root | 1.39 | 1.79 | 1.13 | 1.23 | 1.58 | Glyma.20G110000.1 | TRICHOME BIREFRINGENCE-LIKE 36 |
| Root | −1.39 | −1.75 | −1.13 | 1.23 | 1.55 | Glyma.10G283800.2 | Major facilitator superfamily protein |
| Root | 1.24 | 1.56 | 1.01 | 1.23 | 1.55 | Glyma.13G240800.6 | RING/U-box superfamily protein |
| Root | 1.28 | 1.73 | 1.04 | 1.22 | 1.66 | Glyma.12G006700.1 | P-loop containing nucleoside triphosphate hydrolases |
| | | | | | | | superfamily protein |
| Root | 1.27 | 1.76 | 1.04 | 1.22 | 1.70 | Glyma.15G046400.8 | Phosphatidylinositol-4-phosphate 5-kinase family protein |
| Root | 1.26 | 1.62 | 1.03 | 1.22 | 1.56 | Glyma.03G008500.16 | SKP1-like 21 |
| Root | 1.26 | 1.86 | 1.03 | 1.22 | 1.81 | Glyma.19G226400.1 | shaggy-related kinase 11 |
| Root | −1.55 | −2.09 | −1.28 | 1.22 | 1.64 | Glyma.07G074400.3 | NAD(P)-binding Rossmann-fold superfamily protein |
| Root | −1.29 | −1.70 | −1.06 | 1.21 | 1.60 | Glyma.16G186100.1 | disease resistance family protein/LRR family protein |
| Root | 1.33 | 1.73 | 1.12 | 1.19 | 1.54 | Glyma.01G203000.1 | |
| Root | 1.33 | 1.71 | 1.12 | 1.19 | 1.53 | Glyma.11G211100.1 | Leucine-rich repeat protein kinase family protein |
| Root | −1.37 | −2.03 | −1.15 | 1.19 | 1.76 | Glyma.10G039200.2 | no pollen germination related 2 |
| Root | 1.21 | 1.68 | 1.02 | 1.18 | 1.65 | Glyma.13G289300.2 | Ras-related small GTP-binding family protein |
| Root | −1.18 | −1.89 | −1.00 | 1.18 | 1.89 | Glyma.16G183400.1 | disease resistance family protein/LRR family protein |
| Root | 1.18 | 1.52 | 1.01 | 1.17 | 1.51 | Glyma.13G132700.1 | DNAse I-like superfamily protein |
| Root | −1.26 | −1.70 | −1.09 | 1.16 | 1.56 | Glyma.19G012300.2 | BAH domain; TFIIS helical bundle-like domain |
| Root | −1.22 | −1.58 | −1.06 | 1.16 | 1.50 | Glyma.16G195800.1 | cytochrome P450, family 71, subfamily A, polypeptide 22 |
| Root | −1.17 | −2.08 | −1.01 | 1.16 | 2.06 | Glyma.04G245400.2 | histone methyltransferases(H3-K4 specific); histone |
| | | | | | | | methyltransferases(H3-K36 specific) |
| Root | −1.32 | −2.26 | −1.14 | 1.15 | 1.98 | Glyma.09G215000.2 | HAC13 protein (HAC13) |
| Root | 1.21 | 3.51 | 1.06 | 1.15 | 3.33 | Glyma.08G288500.1 | K+ uptake permease 6 |
| Root | −1.18 | −2.01 | −1.02 | 1.15 | 1.96 | Glyma.13G333500.1 | Ras-related small GTP-binding family protein |
| Root | 1.29 | 1.75 | 1.13 | 1.15 | 1.55 | Glyma.12G211000.4 | Mitogen activated protein kinase kinase kinase-related |
| Root | −1.31 | −1.73 | −1.14 | 1.15 | 1.52 | Glyma.11G104200.5 | homolog of X-ray repair cross complementing 2 (XRCC2) |
| Root | 1.21 | 2.35 | 1.05 | 1.15 | 2.24 | Glyma.16G002600.1 | Octicosapeptide/Phox/Bem1p family protein |
| Root | −1.17 | −2.36 | −1.02 | 1.14 | 2.31 | Glyma.05G114100.1 | Protein kinase superfamily protein |
| Root | −1.25 | −1.80 | −1.09 | 1.14 | 1.65 | Glyma.17G061200.6 | villin 4 |
| Root | 1.27 | 1.70 | 1.12 | 1.14 | 1.51 | Glyma.20G145700.3 | D-aminoacid aminotransferase-like PLP-dependent enzymes |
| | | | | | | | superfamily protein |
| Root | −1.26 | −2.83 | −1.11 | 1.14 | 2.54 | Glyma.09G135200.5 | NAD(P)-binding Rossmann-fold superfamily protein |
| Root | −1.20 | −1.66 | −1.05 | 1.14 | 1.57 | Glyma.15G207700.3 | Protein of unknown function (DUF1637) |
| Root | 1.21 | 2.33 | 1.06 | 1.13 | 2.19 | Glyma.03G021100.6 | |
| Root | −1.42 | −2.16 | −1.25 | 1.13 | 1.72 | Glyma.13G210700.3 | alpha/beta-Hydrolases superfamily protein |
| Root | −1.31 | −1.79 | −1.16 | 1.13 | 1.55 | Glyma.02G308800.1 | 5\′-AMP-activated protein kinase beta-2 subunit protein |
| Root | 1.21 | 1.68 | 1.08 | 1.12 | 1.56 | Glyma.06G029000.4 | Tetrapyrrole (Corrin/Porphyrin) Methylases |
| Root | 1.35 | 1.83 | 1.21 | 1.12 | 1.51 | Glyma.05G188000.1 | |
| Root | 1.18 | 1.80 | 1.05 | 1.12 | 1.71 | Glyma.01G132000.1 | with no lysine (K) kinase 5 |
| Root | −1.16 | −1.62 | −1.04 | 1.12 | 1.56 | Glyma.14G060900.3 | Ribosomal protein L10 family protein |
| Root | 1.16 | 1.66 | 1.04 | 1.12 | 1.60 | Glyma.18G040600.1 | O-Glycosyl hydrolases family 17 protein |
| Root | −1.18 | −1.97 | −1.06 | 1.11 | 1.85 | Glyma.15G099100.2 | RING/U-box superfamily protein |
| Root | 1.17 | 1.68 | 1.05 | 1.11 | 1.59 | Glyma.03G253500.3 | non-photochemical quenching 1 |
| Root | −1.12 | −1.73 | −1.00 | 1.11 | 1.72 | Glyma.14G050300.2 | |
| Root | −1.22 | −1.67 | −1.09 | 1.11 | 1.52 | Glyma.08G117300.3 | RING/FYVE/PHD zinc finger superfamily protein |
| Root | 1.19 | 1.81 | 1.08 | 1.11 | 1.68 | Glyma.13G328900.1 | ROP interactive partner 5 |
| Root | 1.11 | 1.53 | 1.00 | 1.11 | 1.52 | Glyma.06G049200.1 | Integrase-type DNA-binding superfamily protein |
| Root | 1.14 | 1.77 | 1.03 | 1.11 | 1.72 | Glyma.01G196500.1 | |
| Root | −1.22 | −1.84 | −1.11 | 1.11 | 1.66 | Glyma.20G247400.2 | Major facilitator superfamily protein |
| Root | 1.26 | 1.81 | 1.14 | 1.11 | 1.59 | Glyma.04G123000.1 | |
| Root | 2.37 | 3.37 | 2.15 | 1.10 | 1.57 | Glyma.11G154300.2 | NagB/RpiA/CoA transferase-like superfamily protein |
| Root | −1.11 | −1.54 | −1.00 | 1.10 | 1.53 | Glyma.11G058500.1 | |
| Root | −1.36 | −1.94 | −1.24 | 1.10 | 1.57 | Glyma.12G189500.3 | BRI1 suppressor 1 (BSU1)-like 2 |
| Root | 1.15 | 1.82 | 1.05 | 1.10 | 1.73 | Glyma.06G086700.3 | |
| Root | −1.19 | −1.67 | −1.09 | 1.09 | 1.53 | Glyma.05G215100.2 | myosin heavy chain-related |
| Root | −1.22 | −2.17 | −1.13 | 1.08 | 1.92 | Glyma.19G012300.5 | BAH domain; TFIIS helical bundle-like domain |
| Root | −1.11 | 1.57 | −1.03 | 1.08 | −1.53 | Glyma.10G182000.7 | |
| Root | 1.09 | 1.55 | 1.02 | 1.08 | 1.52 | Glyma.04G192200.5 | retinoblastoma-related 1 |
| Root | 1.17 | 1.66 | 1.09 | 1.07 | 1.52 | Glyma.U034500.5 | pseudo-response regulator 3 |
| Root | −1.17 | −2.20 | −1.10 | 1.07 | 2.01 | Glyma.19G012300.6 | BAH domain; TFIIS helical bundle-like domain |
| Root | 1.16 | 1.68 | 1.09 | 1.07 | 1.55 | Glyma.06G124000.2 | Glycolipid transfer protein (GLTP) family protein |
| Root | −1.21 | −14.60 | −1.14 | 1.06 | 12.85 | Glyma.02G282700.2 | helicase in vascular tissue and tapetum |
| Root | 1.12 | 1.83 | 1.06 | 1.06 | 1.73 | Glyma.09G103300.3 | nucleic acid binding; methyltransferases |
| Root | −1.25 | −1.82 | −1.18 | 1.06 | 1.54 | Glyma.20G149400.2 | Ribosomal protein S3Ae |
| Root | −1.22 | −3.76 | −1.15 | 1.06 | 3.27 | Glyma.11G232900.1 | P-loop containing nucleoside triphosphate hydrolases |
| | | | | | | | superfamily protein |
| Root | −1.32 | −2.12 | −1.25 | 1.06 | 1.70 | Glyma.10G024500.3 | Tudor/PWWP/MBT domain-containing protein |
| Root | 1.07 | 1.61 | 1.02 | 1.06 | 1.58 | Glyma.10G145100.1 | ADP-ribosylation factor A1F |
| Root | −1.19 | −1.78 | −1.13 | 1.05 | 1.58 | Glyma.04G009800.1 | myo-inositol monophosphatase like 2 |
| Root | −1.07 | −1.59 | −1.02 | 1.05 | 1.56 | Glyma.11G067300.2 | U1 small nuclear ribonucleoprotein-70K |
| Root | 1.13 | 1.63 | 1.08 | 1.05 | 1.51 | Glyma.01G053600.2 | Protein of unknown function (DUF1336) |
| Root | 1.10 | 1.61 | 1.05 | 1.04 | 1.52 | Glyma.02G301400.1 | Plant protein of unknown function (DUF827) |
| Root | 1.06 | 1.63 | 1.03 | 1.04 | 1.59 | Glyma.19G129400.1 | Arv1-like protein |
| Root | −1.07 | −1.61 | −1.03 | 1.04 | 1.57 | Glyma.03G176300.3 | Glutathione S-transferase family protein |
| Root | −1.18 | −1.95 | −1.14 | 1.03 | 1.71 | Glyma.03G019300.3 | AGAMOUS-like 20 |
| Root | −1.07 | −1.59 | −1.04 | 1.03 | 1.53 | Glyma.18G016200.1 | DNAJ heat shock family protein |
| Root | 1.09 | 1.64 | 1.07 | 1.02 | 1.54 | Glyma.08G055000.3 | non-intrinsic ABC protein 3 |
| Root | 1.20 | 2.24 | 1.18 | 1.02 | 1.90 | Glyma.18G156100.1 | NAD(P)-binding Rossmann-fold superfamily protein |
| Root | 1.20 | 2.24 | 1.18 | 1.02 | 1.90 | Glyma.18G156100.3 | NAD(P)-binding Rossmann-fold superfamily protein |
| Root | −1.04 | −1.98 | −1.02 | 1.02 | 1.93 | Glyma.04G072500.1 | |
| Root | −1.12 | −1.79 | −1.10 | 1.02 | 1.62 | Glyma.20G157600.10 | homolog of DNA mismatch repair protein MSH3 |
| Root | 1.17 | 1.77 | 1.15 | 1.01 | 1.54 | Glyma.18G101700.2 | |
| Root | 1.01 | −1.59 | 1.00 | 1.01 | −1.59 | Glyma.20G238800.1 | RING/U-box protein |
| Root | −1.04 | −2.02 | −1.03 | 1.01 | 1.96 | Glyma.05G216800.1 | Pleckstrin homology (PH) domain-containing protein |
| Root | 1.22 | 2.46 | 1.20 | 1.01 | 2.05 | Glyma.19G233000.2 | Protein of unknown function (DUF1624) |
| Root | −1.17 | −2.55 | −1.15 | 1.01 | 2.21 | Glyma.02G228600.2 | |
| Root | 1.07 | 1.67 | 1.05 | 1.01 | 1.59 | Glyma.02G122700.5 | 18S pre-ribosomal assembly protein gar2-related |
| Root | 1.39 | 2.42 | 1.38 | 1.01 | 1.76 | Glyma.17G245000.2 | Protein of unknown function, DUF547 |
| Root | −1.08 | −1.66 | −1.07 | 1.01 | 1.55 | Glyma.09G275900.7 | Protein kinase superfamily protein |
| Root | 1.20 | 2.24 | 1.19 | 1.01 | 1.89 | Glyma.09G254200.2 | jasmonic acid carboxyl methyltransferase |
| Root | 1.05 | 1.58 | 1.04 | 1.01 | 1.52 | Glyma.19G255100.2 | alpha/beta-Hydrolases superfamily protein |
| Root | −1.12 | −2.26 | −1.11 | 1.01 | 2.04 | Glyma.04G155000.2 | Family of unknown function (DUF566) |
| Root | −1.08 | −1.64 | −1.08 | 1.00 | 1.52 | Glyma.20G161400.7 | UB-like protease 1A |
| Root | −1.06 | −1.63 | −1.06 | 1.00 | 1.54 | Glyma.19G047800.1 | abscisic acid (aba)-deficient 4 |
| Root | −1.02 | 1.68 | −1.02 | 1.00 | −1.65 | Glyma.06G317700.4 | U-box domain-containing protein kinase family protein |
| Root | 1.20 | 1.92 | 1.20 | 1.00 | 1.60 | Glyma.13G130300.1 | Ankyrin repeat family protein |
| Root | −1.04 | −1.62 | −1.05 | 1.00 | 1.55 | Glyma.03G172700.5 | pyrophosphorylase 4 |
| Root | 1.05 | 3.13 | 1.05 | 1.00 | 2.97 | Glyma.11G112000.4 | squalene synthase 1 |
| Root | 1.06 | 3.03 | 1.06 | 1.00 | 2.84 | Glyma.10G035200.6 | alpha/beta-Hydrolases superfamily protein |
| Root | 1.06 | 2.26 | 1.07 | 0.99 | 2.12 | Glyma.07G102800.3 | Vacuolar protein sorting-associated protein 26 |
| Root | 1.05 | 2.89 | 1.05 | 0.99 | 2.74 | Glyma.10G083600.6 | |
| Root | 1.05 | 2.09 | 1.06 | 0.99 | 1.98 | Glyma.17G112800.1 | |
| Root | 1.06 | 3.23 | 1.07 | 0.99 | 3.02 | Glyma.20G220200.1 | phloem protein 2-B10 |
| Root | 1.06 | 1.83 | 1.07 | 0.99 | 1.72 | Glyma.17G051300.2 | phospholipid:diacylglycerol acyltransferase |
| Root | −1.02 | −1.69 | −1.03 | 0.99 | 1.64 | Glyma.05G209400.2 | ubiquitin-conjugating enzyme 5 |
| Root | −1.06 | −1.97 | −1.07 | 0.99 | 1.84 | Glyma.06G192200.1 | ribosomal protein L29 family protein |
| Root | 1.05 | 5.92 | 1.07 | 0.98 | 5.52 | Glyma.16G155800.1 | histidinol phosphate aminotransferase 1 |
| Root | 1.20 | 3.40 | 1.22 | 0.98 | 2.79 | Glyma.06G107200.2 | electron carriers; protein disulfide oxidoreductases |
| Root | 2.26 | 3.93 | 2.31 | 0.98 | 1.70 | Glyma.08G117300.2 | RING/FYVE/PHD zinc finger superfamily protein |
| Root | 1.03 | 2.13 | 1.06 | 0.97 | 2.00 | Glyma.19G250900.4 | |
| Root | −1.00 | −1.81 | −1.03 | 0.97 | 1.75 | Glyma.16G219900.9 | B-block binding subunit of TFIIIC |
| Root | −1.02 | −1.93 | −1.05 | 0.97 | 1.83 | Glyma.09G229600.1 | P-loop containing nucleoside triphosphate hydrolases |
| | | | | | | | superfamily protein |
| Root | −1.15 | −2.15 | −1.19 | 0.96 | 1.81 | Glyma.04G185600.2 | |
| Root | −1.15 | −1.82 | −1.19 | 0.96 | 1.53 | Glyma.18G234900.3 | ARID/BRIGHT DNA-binding domain; ELM2 domain protein |
| Root | −1.11 | −3.07 | −1.16 | 0.96 | 2.64 | Glyma.04G185500.2 | |
| Root | 1.04 | 1.72 | 1.09 | 0.95 | 1.57 | Glyma.04G228900.1 | |
| Root | −1.06 | −9.31 | −1.11 | 0.95 | 8.36 | Glyma.06G098900.2 | phosphoenolpyruvate carboxylase-related kinase 2 |
| Root | 1.01 | 1.90 | 1.06 | 0.95 | 1.79 | Glyma.05G201200.1 | dual specificity protein phosphatase family protein |
| Root | 1.07 | 1.79 | 1.13 | 0.95 | 1.58 | Glyma.15G035700.2 | Chaperone DnaJ-domain superfamily protein |
| Root | 1.05 | 1.85 | 1.11 | 0.95 | 1.66 | Glyma.12G074600.2 | hercules receptor kinase 1 |
| Root | −1.06 | −2.10 | −1.12 | 0.94 | 1.87 | Glyma.20G101400.1 | aluminum-activated, malate transporter 12 |
| Root | −1.01 | −1.63 | −1.08 | 0.94 | 1.51 | Glyma.05G009000.1 | early nodulin-related |
| Root | −1.12 | −2.88 | −1.20 | 0.93 | 2.41 | Glyma.07G002800.2 | Rad23 UV excision repair protein family |
| Root | 1.24 | 2.05 | 1.34 | 0.93 | 1.53 | Glyma.09G072000.1 | Integrase-type DNA-binding superfamily protein |
| Root | −1.01 | −1.70 | −1.10 | 0.92 | 1.54 | Glyma.05G104400.5 | 2-oxoglutarate (2OG) and Fe(II)-dependent oxygenase |
| | | | | | | | superfamily protein |
| Root | −1.03 | −2.07 | −1.14 | 0.91 | 1.82 | Glyma.17G178800.3 | sucrose nonfermenting 1(SNF1)-related protein kinase 2.3 |
| Root | 1.01 | 1.70 | 1.12 | 0.90 | 1.52 | Glyma.03G101700.2 | Fatty acid hydroxylase superfamily |
| Root | −1.09 | −1.87 | −1.21 | 0.90 | 1.55 | Glyma.02G033300.1 | Adaptor protein complex AP-1, gamma subunit |
| Root | 1.07 | 3.44 | 1.20 | 0.89 | 2.87 | Glyma.16G040900.3 | adenosine-5\′-phosphosulfate (APS) kinase 3 |
| Root | 1.07 | 5.61 | 1.21 | 0.89 | 4.62 | Glyma.15G234500.1 | |
| Root | −1.03 | −6.78 | −1.16 | 0.88 | 5.84 | Glyma.14G108700.2 | Major facilitator superfamily protein |
| Root | 1.06 | 2.48 | 1.20 | 0.88 | 2.06 | Glyma.19G009300.5 | Pre-rRNA-processing protein TSR2, conserved region |
| Root | 1.06 | 2.27 | 1.21 | 0.88 | 1.88 | Glyma.05G248100.3 | alpha/beta-Hydrolases superfamily protein |
| Root | 1.06 | 2.04 | 1.22 | 0.87 | 1.68 | Glyma.09G209200.2 | Protein of unknown function (DUF760) |
| Root | 1.09 | 12.94 | 1.25 | 0.87 | 10.31 | Glyma.15G053000.6 | dentin sialophosphoprotein-related |
| Root | 1.15 | 2.17 | 1.33 | 0.86 | 1.63 | Glyma.15G180000.1 | Integrase-type DNA-binding superfamily protein |
| Root | 1.07 | 2.74 | 1.24 | 0.86 | 2.21 | Glyma.02G172900.2 | Protein phosphatase 2C family protein |
| Root | −1.19 | −6.95 | −1.47 | 0.81 | 4.73 | Glyma.13G332300.3 | sequence-specific DNA binding; sequence-specific DNA binding |
| | | | | | | | transcription factors |
| Root | −1.06 | −2.45 | −1.63 | 0.65 | 1.50 | Glyma.02G198100.10 | |
| Root | 1.00 | −1.95 | −1.30 | −0.77 | 1.50 | Glyma.05G116900.3 | tobamovirus multiplication 1 |
| Root | 1.04 | −1.88 | −1.25 | −0.83 | 1.50 | Glyma.13G042600.4 | GTP cyclohydrolase II |
| Root | 1.02 | −1.74 | −1.11 | −0.92 | 1.57 | Glyma.13G199600.1 | Erv1/Alr family protein |
| Root | 1.01 | −1.65 | −1.09 | −0.92 | 1.51 | Glyma.01G048500.3 | galactosyltransferase1 |
| Root | −1.01 | 1.96 | 1.09 | −0.93 | 1.80 | Glyma.16G207200.1 | histone-lysine N-methyltransferase ASHH3 |
| Root | 1.02 | −3.22 | −1.08 | −0.94 | 2.98 | Glyma.04G105000.2 | tRNA modification GTPase, putative |
| Root | −1.04 | 1.74 | 1.08 | −0.96 | 1.61 | Glyma.11G179600.3 | NIMA (never in mitosis, gene A)-related 6 |
| Root | 1.02 | −1.62 | −1.06 | −0.96 | 1.53 | Glyma.07G232500.1 | CRT (chloroquine-resistance transporter)-like transporter 3 |
| Root | −1.03 | −1.85 | 1.07 | −0.97 | −1.73 | Glyma.19G243200.2 | Plant protein of unknown function (DUF868) |
| Root | 1.01 | 2.16 | −1.04 | −0.97 | −2.07 | Glyma.10G209600.2 | Zinc finger (C2H2 type) family protein/transcription factor |
| | | | | | | | jumonji (jmj) family protein |
| Root | 1.07 | −1.68 | −1.10 | −0.97 | 1.53 | Glyma.18G230900.3 | Ribosomal protein S5 domain 2-like superfamily protein |
| Root | −1.05 | 1.65 | 1.07 | −0.98 | 1.54 | Glyma.16G178400.1 | Heavy metal transport/detoxification superfamily protein |
| Root | −1.05 | −1.66 | 1.06 | −0.98 | −1.56 | Glyma.05G104400.3 | 2-oxoglutarate (2OG) and Fe(II)-dependent oxygenase |
| | | | | | | | superfamily protein |
| Root | −1.02 | 1.71 | 1.02 | −0.99 | 1.67 | Glyma.06G135900.1 | |
| Root | 1.00 | −1.67 | −1.00 | −1.00 | 1.67 | Glyma.02G095900.6 | Phosphatidylinositol N-acetyglucosaminlytransferase subunit P- |
| | | | | | | | related |
| Root | −1.05 | 2.14 | 1.04 | −1.01 | 2.06 | Glyma.17G242500.2 | plant glycogenin-like starch initiation protein 3 |
| Root | 1.05 | −1.70 | −1.01 | −1.04 | 1.69 | Glyma.17G242500.1 | plant glycogenin-like starch initiation protein 3 |
| Root | 1.07 | 1.56 | −1.02 | −1.04 | −1.53 | Glyma.01G064600.1 | ACT domain repeat 4 |
| Root | −1.08 | −1.78 | 1.03 | −1.06 | −1.73 | Glyma.19G247600.1 | Homeodomain-like superfamily protein |
| Root | 1.11 | 1.69 | −1.04 | −1.07 | −1.62 | Glyma.06G215200.1 | Cytochrome P450 superfamily protein |
| Root | 1.08 | −1.56 | −1.01 | −1.07 | 1.55 | Glyma.13G161900.1 | purple acid phosphatase 26 |
| Root | −1.15 | −8.39 | 1.07 | −1.07 | −7.86 | Glyma.13G031600.3 | amino acid permease 2 |
| Root | −1.15 | 4.09 | 1.06 | −1.08 | 3.85 | Glyma.13G124800.1 | AGC (cAMP-dependent, cGMP-dependent and protein kinase C) |
| | | | | | | | kinase family protein |
| Root | −1.08 | −1.54 | 1.00 | −1.08 | −1.54 | Glyma.01G089500.7 | |
| Root | 1.14 | 1.84 | −1.04 | −1.09 | −1.76 | Glyma.17G066700.3 | Protein kinase superfamily protein |
| Root | −1.12 | −1.70 | 1.01 | −1.10 | −1.68 | Glyma.05G232400.8 | Fibronectin type III domain-containing protein |
| Root | −1.13 | −1.64 | 1.02 | −1.11 | −1.61 | Glyma.01G045800.1 | peroxisomal adenine nucleotide carrier 1 |
| Root | 1.12 | 1.57 | −1.01 | −1.11 | −1.57 | Glyma.10G038700.1 | Ypt/Rab-GAP domain of gyp1p superfamily protein |
| Root | −1.13 | −1.52 | 1.00 | −1.13 | −1.52 | Glyma.15G069200.6 | Protein of unknown function (DUF707) |
| Root | −1.15 | −1.53 | 1.00 | −1.14 | −1.52 | Glyma.14G162700.1 | hAT transposon superfamily |
| Root | 1.17 | 1.66 | −1.01 | −1.16 | −1.65 | Glyma.08G198900.1 | Leucine-rich repeat protein kinase family protein |
| Root | −1.22 | −1.63 | 1.02 | −1.19 | −1.59 | Glyma.19G071700.1 | Ribosomal protein S24e family protein |
| Root | 1.23 | 1.89 | −1.01 | −1.21 | −1.87 | Glyma.06G122800.2 | serine carboxypeptidase-like 25 |
| Root | −1.23 | −1.84 | 1.01 | −1.22 | −1.82 | Glyma.10G052700.2 | vacuolar membrane ATPase 10 |
| Root | −1.26 | −1.74 | 1.03 | −1.22 | −1.69 | Glyma.09G215800.2 | SH3 domain-containing protein |
| Root | −1.27 | −1.56 | 1.03 | −1.24 | −1.52 | Glyma.03G236900.3 | homolog of yeast sucrose nonfermenting 4 |
| Root | −1.31 | −1.80 | 1.06 | −1.24 | −1.71 | Glyma.16G175500.1 | UDP-glucosyl transferase 88A1 |
| Root | −1.33 | −1.58 | 1.02 | −1.30 | −1.54 | Glyma.16G190100.1 | CAP160 protein |
| Root | 1.37 | 1.59 | −1.06 | −1.30 | −1.50 | Glyma.14G116000.7 | Protein kinase superfamily protein |
| Root | −1.38 | −1.60 | 1.03 | −1.35 | −1.56 | Glyma.13G217600.3 | RNA-binding protein |
| Root | 1.41 | 1.59 | −1.01 | −1.40 | −1.58 | Glyma.02G083700.2 | |
| Root | 1.43 | 1.76 | −1.01 | −1.41 | −1.73 | Glyma.02G248400.1 | XH/XS domain-containing protein |
| Root | −1.60 | −1.98 | 1.05 | −1.53 | −1.89 | Glyma.16G169200.1 | receptor like protein 6 |
| Root | 1.56 | 1.67 | −1.01 | −1.55 | −1.66 | Glyma.16G174900.1 | P-loop containing nucleoside triphosphate hydrolases |
| | | | | | | | superfamily protein |
| Root | −1.75 | −1.96 | 1.07 | −1.63 | −1.82 | Glyma.16G159300.1 | Disease resistance protein (TIR-NBS-LRR class) family |
| Root | 1.67 | 1.54 | −1.00 | −1.66 | −1.53 | Glyma.18G030100.1 | Mitochondrial substrate carrier family protein |
| Root | −1.72 | −1.55 | 1.03 | −1.68 | −1.51 | Glyma.16G159200.1 | Disease resistance protein (TIR-NBS-LRR class) family |

TABLE 8
Plant Proteomics
Fold change increase or decrease of plant proteins secreted under normal watering and water-
limited conditions, in root and leaf tissues of plants grown from seeds treated with Strain B,
compared to plants grown from seeds treated with the formulation control

| | Normal | | Water- | |
|---|---|---|---|---|
| | Watering | | Limited | |
| | Conditions | | Conditions | |
| Protein Name | Root | Leaf | Root | Leaf |
| alcohol dehydrogenase 1 | 0.73 | | | 1.39 |
| chloroplast stem-loop binding protein of 41 kDa a, chloroplastic-like | 0.87 | 1.17 | | 1.45 |
| cucumisin-like isoform X2 | 0.89 | 1.23 | | 1.39 |
| cytochrome b6-f complex iron-sulfur subunit, chloroplastic-like | 1.16 | | | 1.31 |
| sedoheptulose-1,7-bisphosphatase, chloroplastic-like isoform 1 | | 1.15 | | 1.26 |
| ATP synthase CF1 alpha subunit | | 1.16 | | 1.30 |
| methionine synthase | | 1.16 | | 1.61 |
| LOW QUALITY PROTEIN: 50S ribosomal protein L11, chloroplastic-like | | 1.18 | | 1.41 |
| ruBisCO-associated protein | | 1.24 | | 2.06 |
| peroxidase 50-like | | | 0.79 | 1.45 |
| aconitate hydratase 2, mitochondrial-like | | | 0.87 | 1.33 |
| lipoxygenase | | | 1.14 | 1.32 |
| cytochrome f | | | | 1.27 |
| aspartate aminotransferase glyoxysomal isozyme AAT1 precursor | | | | 1.34 |
| vicianin hydrolase-like | | | | 1.54 |
| 3-ketoacyl-CoA thiolase 2, peroxisomal-like isoform X1 | | 0.90 | 1.33 | 0.71 |
| protein CURVATURE THYLAKOID 1A, chloroplastic-like | | 0.79 | 1.31 | 0.60 |
| alcohol dehydrogenase class-3 | 0.75 | | 1.53 | |
| glutamine synthetase precursor isoform X1 | 0.80 | | 1.27 | |
| UTP--glucose-1-phosphate uridylyltransferase-like | 0.85 | 0.88 | 1.27 | |
| enolase-phosphatase E1-like | 0.86 | | 1.52 | |
| luminal-binding protein | 0.86 | | 1.33 | 1.24 |
| ketol-acid reductoisomerase, chloroplastic-like | 0.87 | 0.90 | 1.39 | |
| beta-amylase precursor | 1.17 | 0.88 | 1.28 | |
| peptidyl-prolyl cis-trans isomerase, chloroplastic isoform 1 | | | 1.27 | |
| aldehyde dehydrogenase family 3 member I1, chloroplastic-like | | | 1.30 | |
| 50S ribosomal protein L6, chloroplastic-like isoform 1 | | | 1.30 | |
| lipoxygenase-9 | | | 1.39 | 1.16 |
| 26S protease regulatory subunit 10B homolog A-like | | | 1.40 | |
| heat shock protein 90-1 | | | 1.46 | |
| DNA-damage-repair/toleration protein DRT100-like precursor | | | 1.51 | 1.14 |
| glutamate--glyoxylate aminotransferase 2-like isoform 2 | 0.72 | | 1.39 | 1.26 |
| fructose-bisphosphate aldolase 1, chloroplastic-like | 0.88 | 1.27 | 1.22 | 1.20 |
| stromal 70 kDa heat shock-related protein, chloroplastic-like | 0.88 | 1.30 | 1.19 | |
| thioredoxin M4, chloroplastic-like | 1.11 | 1.29 | | |
| thylakoid lumenal 16.5 kDa protein, chloroplastic-like isoform X1 | 1.17 | 1.51 | | |
| 1-deoxy-D-xylulose 5-phosphate reductoisomerase, chloroplastic-like | 1.21 | 1.32 | | |
| histone H4-like | 1.23 | 1.35 | 0.76 | |
| thylakoid lumenal 29 kDa protein, chloroplastic-like | | 1.32 | 0.82 | |
| probable 60S ribosomal protein L14-like | | 1.32 | | |
| dirigent protein 1-like | | 1.33 | | |
| photosystem II 44 kDa protein | | 1.36 | | |
| lipoxygenase L-5 | | 1.36 | 1.12 | |
| CDGSH iron-sulfur domain-containing protein NEET-like | | 1.47 | | |
| photosystem II protein H | | 1.62 | | |
| thioredoxin-like protein CDSP32, chloroplastic-like | | 1.34 | 0.87 | 1.62 |
| asparagine synthetase, root [glutamine-hydrolyzing]-like | 1.30 | | 0.88 | 0.76 |
| THO complex subunit 4-like isoform X1 | 1.31 | 0.87 | 0.71 | 0.87 |
| peptidyl-prolyl cis-trans isomerase CYP20-2, chloroplastic-like isoform 1 | 1.26 | | | |
| DNA repair and recombination protein RAD26-like | 1.28 | | | 1.13 |
| mitochondrial dicarboxylate/tricarboxylate transporter DTC-like | 1.29 | | 0.90 | 1.10 |
| proteasome subunit alpha type-5-like | 1.33 | | | |
| bifunctional aspartate aminotransferase and glutamate/aspartate- | 1.34 | 0.87 | 0.83 | |
| prephenate aminotransferase-like | | | | |
| cysteine proteinase RD21a-like | 1.43 | | 0.82 | |
| isocitrate dehydrogenase [NADP] | 1.36 | | 1.22 | 1.41 |
| putative glucose-6-phosphate 1-epimerase-like | 0.89 | | | 0.67 |
| putative lactoylglutathione lyase-like isoform X2 | | 0.90 | | 0.73 |
| delta-1-pyrroline-5-carboxylate synthase-like | | | 0.88 | 0.74 |
| probable histone H2B.3 | | | | 0.72 |
| ornithine carbamoyltransferase, chloroplastic-like | | | | 0.73 |
| chaperonin CPN60-like 2, mitochondrial-like | | | | 0.73 |
| ATP synthase CF1 epsilon subunit | | | | 0.75 |
| photosystem I P700 apoprotein A2 | 1.24 | | 0.62 | 1.15 |
| calcium-transporting ATPase 4, plasma membrane-type-like | | | 0.65 | |
| abscisic stress ripening-like protein | | | 0.65 | |
| 3′-hydroxy-N-methyl-(S)-coclaurine4 ′-O-methyltransferase-like | | | 0.69 | |
| sulfite reductase [ferredoxin], chloroplastic | | | 0.70 | |
| 60S ribosomal protein L4-like isoform 1 | | | 0.72 | |
| isocitrate dehydrogenase [NAD] catalytic subunit 5, mitochondrial-like | | | 0.74 | |
| transketolase, chloroplastic | | | 0.76 | |
| putative dihydroxy-acid dehydratase, mitochondrial-like | | 0.89 | 0.64 | 0.78 |
| inositol-3-phosphate synthase | | 0.70 | | 1.20 |
| protease Do-like 2, chloroplastic-like | | 0.77 | | 0.83 |
| T-complex protein 1 subunit gamma-like | | 0.77 | 0.83 | |
| cell division protein FtsZ homolog 1, chloroplastic-like | | 0.79 | 1.19 | 0.82 |
| magnesium-chelatase subunit ChII, chloroplastic | 0.62 | 0.85 | | |
| endoplasmin homolog isoform X2 | 0.63 | | | |
| chloroplast stem-loop binding protein of 41 kDa b, chloroplastic-like | 0.67 | | | |
| isoform X2 | | | | |
| leucine aminopeptidase 3, chloroplastic-like | 0.71 | | | |
| peroxisomal (S)-2-hydroxy-acid oxidase GLO1-like isoform X1 | 0.72 | | 1.18 | |
| patellin-3-like isoform X3 | 0.73 | | | |
| NADP-dependent malic enzyme-like | 0.77 | | 1.23 | |

### Table 9: Plant Hormone Analysis Results

[0842] Plant hormone analysis of plants grown from seeds treated with Strain B, as compared to plants grown from seeds treated with the formulation control, under normal watering and water-limited conditions. The values indicate Strain B/control fold change. Mass spectra of 8 plant hormones were obtained: jasmonic acid (JA), jasmonic acid-isoleucine (JA-Ile), salicylic acid (SA), abscisic acid (ABA), 12-oxo-phytodienoic acid (OPDA), 10-oxo-11 phytoenoic acid (OPEA), traumatic acid (TA) and cinnaminic acid (CA).

### Table 10: Metabolomics Results

TABLE 10A
Metabolic analysis of plants grown from seeds treated with Strain
B under normal (well-watered) conditions. “+” and “−”
denote a relative increase or decrease, respectively, when compared
to control plants grown in similar conditions (formulation control).

| Metabolic process | Metabolite | root | stem | leaf |
|---|---|---|---|---|
| Alkaloid metabolism | tryptophan | − | + | + |
| | phenylalanine | − | | + |
| | tyrosine | − | + | |
| | tryptamine | | − | − |
| | benzoic acid | | | |
| | pipecolic acid | | | + |
| | nicotinic acid | − | | |
| Phenylpropanoid | phenylalanine | − | | + |
| metabolism | shikimic acid | | | |
| | tyrosine | − | + | |
| | quinic acid | − | | |
| | sinapic acid | − | | + |
| | ferulic acid | − | | |
| | caffeic acid | − | + | |
| Flavonoid/isoflavonoid | quinic acid | − | | |
| biosynthesis | shikimic acid | | | |
| | hesperetin | | | |
| | daidzein | − | − | + |
| Lipid metabolism/fatty | ethanolamine | − | | |
| alcohols | ethanolaminephosphate | − | − | + |
| | sphingosine | − | | + |
| | glycerol | − | | |
| | hexadecanoic acid | − | − | |
| | octadecadienoic acid | | − | |
| | octadecanoic acid | − | − | + |
| | dodecanol | − | − | − |
| | campesterol | − | | + |
| Nitrogen | alanine | − | | |
| metabolism/amino | β-alanine | − | | |
| acids | allantoin | − | + | |
| | asparagine | − | − | − |
| | aspartic acid | | + | |
| | glutamic acid | − | + | |
| | glutamine | − | + | − |
| | histidine | − | | |
| | isoleucine | − | + | + |
| | leucine | − | | |
| | methionine | − | | |
| | phenylalanine | − | | + |
| | proline | − | + | + |
| | serine | − | | |
| | threonine | − | | |
| | tryptophan | − | + | + |
| | tyrosine | − | + | |
| | valine | − | − | |
| Carbohydrates | D-glucopyranose | − | + | − |
| | galactose | − | + | + |
| | lyxose | − | | |
| | sucrose | + | + | |
| | threose | − | | + |
| | trehalose | | + | + |
| | xylose | − | | |
| Other | salicylic acid | − | | |
| | pyrogallol | − | + | − |
| | hydroxyquinol | | | |
| | vanillic acid | | − | |
| | gallic acid | − | + | |
| | beta tocopherol | − | | + |
| | galacturonic acid | − | − | + |
| | lumichrome | | − | − |

TABLE 10B
Metabolic analysis of plants grown from seeds treated with Strain
B under water-limited conditions. “+” and “−”
denote a relative increase or decrease, respectively, when compared
to control plants grown in similar conditions (formulation control).

| Metabolic process | Metabolite | root | stem | leaf |
|---|---|---|---|---|
| Alkaloid metabolism | tryptophan | | − | |
| | phenylalanine | | | |
| | tyrosine | | − | |
| | tryptamine | | | |
| | benzoic acid | | + | |
| | pipecolic acid | | | |
| | nicotinic acid | + | | |
| Phenylpropanoid | phenylalanine | | | |
| metabolism | shikimic acid | | | |
| | tyrosine | | − | |
| | quinic acid | | | |
| | sinapic acid | | | + |
| | ferulic acid | + | + | |
| | caffeic acid | + | | + |
| Flavonoid/isoflavonoid | quinic acid | | | |
| biosynthesis | shikimic acid | | | |
| | hesperetin | − | + | − |
| | daidzein | | | |
| Lipid metabolism/fatty | ethanolamine | | | |
| alcohols | ethanolaminephosphate | | | |
| | sphingosine | | | − |
| | glycerol | | | |
| | hexadecanoic acid | | | − |
| | octadecadienoic acid | | + | − |
| | octadecanoic acid | − | − | − |
| | dodecanol | | + | |
| | campesterol | | | |
| Nitrogen | alanine | | + | |
| metabolism/amino | β-alanine | | | + |
| acids | allantoin | | − | |
| | asparagine | | − | + |
| | aspartic acid | | | |
| | glutamic acid | | | |
| | glutamine | | | + |
| | histidine | | − | + |
| | isoleucine | | + | |
| | leucine | | + | + |
| | methionine | | | |
| | phenylalanine | | | |
| | proline | − | − | − |
| | serine | | − | + |
| | threonine | | | |
| | tryptophan | | − | |
| | tyrosine | | − | |
| | valine | | + | + |
| Carbohydrates | D-glucopyranose | + | | − |
| | galactose | | − | |
| | lyxose | | − | |
| | sucrose | | | |
| | threose | | | |
| | trehalose | | | |
| | xylose | | | |
| Other | salicylic acid | | | |
| | pyrogallol | − | + | |
| | hydroxyquinol | | | |
| | vanillic acid | | | |
| | gallic acid | | | |
| | beta tocopherol | | | + |
| | galacturonic acid | + | | + |
| | lumichrome | | + | |

### Table 11: Community Sequencing

TABLE 11A
The average abundance of bacterial genera, as a proportion of the microbial
community, in leaf tissue of water stressed soybean plants grown from seeds treated
with the control Penicillium endophyte Strain F, the beneficial Penicillium endophyte
Strain B, and formulation control are shown. The average abundance of organisms in the
Escherica-Shigella genera were reduced from approximately 22.8% of the bacterial
community of untreated soybean leaves to approximately 16.8% of the bacterial
community in Strain B treated soybean leaves and 15.1% of the bacterial community in
Strain F treated leaves. Treatment with Strain B reduced the abundance of bacteria
in the Escherica-Shigella genera on soybean leaves by 26.6% relative to untreated
controls; treatment with Strain F reduced the abundance of bacteria in the
Escherica-Shigella genera on soybean leaves by 34% relative to untreated controls.

| | | | | | Formulation |
|---|---|---|---|---|---|
| Genus | Strain B | Genus | Strain F | Genus | Control |
| Escherichia- | 0.1676 | Escherichia- | 0.1506 | Escherichia- | 0.2283 |
| Shigella | | Shigella | | Shigella | |
| Bradyrhizobium | 0.0915 | Bradyrhizobium | 0.0636 | Bradyrhizobium | 0.1341 |
| Cellvibrio | 0.0425 | Cellvibrio | 0.0393 | Cellvibrio | 0.0323 |
| Flavobacterium | 0.0239 | Flavobacterium | 0.0330 | Flavobacterium | 0.0273 |
| Piscinibacter | 0.0196 | Burkholderia | 0.0317 | Piscinibacter | 0.0246 |
| Rhizobium | 0.0177 | Rhizobium | 0.0298 | Rhizobium | 0.0213 |
| Methylotenera | 0.0161 | Piscinibacter | 0.0254 | Methylotenera | 0.0188 |
| Massilia | 0.0148 | Massilia | 0.0207 | Massilia | 0.0172 |
| Devosia | 0.0141 | Methylotenera | 0.0166 | Hydrogenophaga | 0.0155 |
| Hydrogenophaga | 0.0120 | Hydrogenophaga | 0.0161 | Pseudomonas | 0.0134 |
| Pseudomonas | 0.0119 | Devosia | 0.0132 | Devosia | 0.0102 |
| Bacillus | 0.0101 | Pseudomonas | 0.0121 | Ohtaekwangia | 0.0077 |
| Ohtaekwangia | 0.0085 | Shinella | 0.0121 | Asticcacaulis | 0.0073 |
| Streptomyces | 0.0079 | Ohtaekwangia | 0.0113 | Bacillus | 0.0062 |
| Methylibium | 0.0073 | Asticcacaulis | 0.0101 | Shinella | 0.0061 |
| Asticcacaulis | 0.0065 | Leptothrix | 0.0093 | Enterococcus | 0.0061 |
| Arthrobacter | 0.0063 | Streptomyces | 0.0078 | Methylibium | 0.0060 |
| Shinella | 0.0063 | Methylibium | 0.0075 | Acidovorax | 0.0054 |
| Acidovorax | 0.0046 | Bacillus | 0.0066 | Niastella | 0.0053 |
| Niastella | 0.0040 | Arthrobacter | 0.0054 | Arthrobacter | 0.0048 |

TABLE 11B
The average abundance of fungal genera, as a proportion of the microbial
community, in root tissue of water stressed soybean plants grown from seeds treated
with the control Penicillium endophyte Strain F, the beneficial Penicillium endophyte
Strain B, and formulation control are shown. The average abundance of fungi in the
Rhizophagus genera were increased from approximately 9.7% of the fungal community of
untreated soybean roots and 9.8% of the fungal community in Strain F treated soybean
roots to approximately 30.5% of the fungal community of Strain B treated soybean roots.
Treatment with Strain B resulted in a 214.4% increase in the abundance of fungi in the
Rhizophagus genera in soybean roots relative to untreated controls.

| | | | | | Formulation |
|---|---|---|---|---|---|
| Genus | Strain B | Genus | Strain F | Genus | Control |
| Rhizophagus | 0.3050 | Claroideoglomus | 0.1993 | Claroideoglomus | 0.2105 |
| Claroideoglomus | 0.1591 | Olpidium | 0.1390 | Olpidium | 0.2040 |
| Funneliformis | 0.0789 | Rhizophagus | 0.0980 | Funneliformis | 0.0977 |
| Olpidium | 0.0504 | Funneliformis | 0.0774 | Rhizophagus | 0.0970 |
| Podospora | 0.0495 | Podospora | 0.0384 | Glomus | 0.0693 |
| Haematonectria | 0.0424 | Haematonectria | 0.0335 | Podospora | 0.0421 |
| Glomus | 0.0337 | Glomus | 0.0295 | Haematonectria | 0.0326 |
| Ilyonectria | 0.0194 | Fusarium | 0.0270 | Ilyonectria | 0.0147 |
| Codinaeopsis | 0.0150 | unidentified | 0.0169 | Fusarium | 0.0145 |
| Fusarium | 0.0113 | Coprinellus | 0.0165 | Chaetomium | 0.0068 |
| Chaetomium | 0.0066 | Conocybe | 0.0145 | unidentified | 0.0062 |
| unidentified | 0.0055 | Chaetomium | 0.0058 | Thielaviopsis | 0.0036 |
| Corollospora | 0.0044 | Corollospora | 0.0057 | Coprinellus | 0.0033 |
| Conocybe | 0.0042 | Zopfiella | 0.0055 | Zopfiella | 0.0024 |
| Zopfiella | 0.0042 | Cladosporium | 0.0034 | Corollospora | 0.0019 |
| unidentified | 0.0032 | Hydnomerulius | 0.0032 | Clonostachys | 0.0019 |
| Lophiostoma | 0.0031 | Myrothecium | 0.0029 | Paraglomus | 0.0016 |
| Thielaviopsis | 0.0029 | unidentified | 0.0024 | Myrothecium | 0.0016 |
| Ambispora | 0.0024 | Clonostachys | 0.0021 | Aureobasidium | 0.0015 |
| Pseudeurotium | 0.0024 | Paraphaeosphaeria | 0.0021 | Sarocladium | 0.0009 |

TABLE 11C
The average abundance of bacterial families, as a proportion of the microbial
community, in leaf tissue of water stressed soybean plants grown from seeds treated
with the control Penicillium endophyte Strain F, the beneficial Penicillium endophyte
Strain B, and formulation control are shown.

| | | | | | Formulation |
|---|---|---|---|---|---|
| Family | Strain B | Family | Strain F | Family | Control |
| Enterobacteriaceae | 0.1687 | Enterobacteriaceae | 0.1552 | Enterobacteriaceae | 0.2297 |
| Bradyrhizobiaceae | 0.0954 | Comamonadaceae | 0.0885 | Bradyrhizobiaceae | 0.1382 |
| Comamonadaceae | 0.0682 | Bradyrhizobiaceae | 0.0649 | Comamonadaceae | 0.0799 |
| Pseudomonadaceae | 0.0544 | Pseudomonadaceae | 0.0514 | Pseudomonadaceae | 0.0457 |
| Flavobacteriaceae | 0.0278 | Rhizobiaceae | 0.0422 | Flavobacteriaceae | 0.0311 |
| Rhizobiaceae | 0.0245 | Flavobacteriaceae | 0.0356 | Rhizobiaceae | 0.0274 |
| Methylophilaceae | 0.0214 | Burkholderiaceae | 0.0355 | Methylophilaceae | 0.0222 |
| Cytophagaceae | 0.0212 | Cytophagaceae | 0.0292 | Cytophagaceae | 0.0212 |
| Oxalobacteraceae | 0.0180 | Methylophilaceae | 0.0247 | Oxalobacteraceae | 0.0184 |
| Hyphomicrobiaceae | 0.0151 | Oxalobacteraceae | 0.0231 | Anaerolineaceae | 0.0118 |
| Anaerolineaceae | 0.0132 | Hyphomicrobiaceae | 0.0149 | Chitinophagaceae | 0.0117 |
| Caulobacteraceae | 0.0115 | Caulobacteraceae | 0.0143 | Hyphomicrobiaceae | 0.0110 |
| Bacillaceae | 0.0108 | Chitinophagaceae | 0.0108 | Caulobacteraceae | 0.0090 |
| Chitinophagaceae | 0.0101 | Anaerolineaceae | 0.0081 | Sphingomonadaceae | 0.0081 |
| Planctomycetaceae | 0.0093 | Xanthomonadaceae | 0.0080 | Bacillaceae | 0.0077 |
| Streptomycetaceae | 0.0079 | Streptomycetaceae | 0.0078 | SHA-31 | 0.0063 |
| SHA-31 | 0.0068 | Planctomycetaceae | 0.0077 | Enterococcaceae | 0.0061 |
| Xanthomonadaceae | 0.0064 | Bacillaceae | 0.0066 | Rhodospirillaceae | 0.0053 |
| Micrococcaceae | 0.0063 | Sphingomonadaceae | 0.0060 | Xanthomonadaceae | 0.0051 |
| Rhodospirillaceae | 0.0052 | Saprospiraceae | 0.0058 | Micrococcaceae | 0.0048 |

TABLE 11D
The average abundance of bacterial families, as a proportion of the microbial
community, in root tissue of water stressed soybean plants grown from seeds
treated with th control Penicillium endophyte Strain F, the beneficial
Penicillium endophyte Strain B, and formulation control are shown.

| | | | | | Formulation |
|---|---|---|---|---|---|
| Family | Strain B | Family | Strain F | Family | Control |
| Bradyrhizobiaceae | 0.1337 | Comamonadaceae | 0.1061 | Bradyrhizobiaceae | 0.2016 |
| Pseudomonadaceae | 0.1085 | Pseudomonadaceae | 0.0999 | Comamonadaceae | 0.0858 |
| Comamonadaceae | 0.1014 | Bradyrhizobiaceae | 0.0861 | Pseudomonadaceae | 0.0748 |
| Flavobacteriaceae | 0.0554 | Flavobacteriaceae | 0.0586 | Flavobacteriaceae | 0.0590 |
| Cytophagaceae | 0.0431 | Cytophagaceae | 0.0455 | Cytophagaceae | 0.0455 |
| Methylophilaceae | 0.0376 | Methylophilaceae | 0.0455 | Methylophilaceae | 0.0381 |
| Rhizobiaceae | 0.0292 | Oxalobacteraceae | 0.0357 | Rhizobiaceae | 0.0271 |
| Caulobacteraceae | 0.0149 | Rhizobiaceae | 0.0320 | Chitinophagaceae | 0.0205 |
| Oxalobacteraceae | 0.0147 | Caulobacteraceae | 0.0197 | Caulobacteraceae | 0.0177 |
| Hyphomicrobiaceae | 0.0140 | Chitinophagaceae | 0.0185 | Oxalobacteraceae | 0.0165 |
| Chitinophagaceae | 0.0135 | Hyphomicrobiaceae | 0.0133 | Hyphomicrobiaceae | 0.0120 |
| Streptomycetaceae | 0.0134 | Streptomycetaceae | 0.0112 | Streptomycetaceae | 0.0097 |
| Micrococcaceae | 0.0058 | Micrococcaceae | 0.0063 | Chromatiaceae | 0.0069 |
| Anaerolineaceae | 0.0055 | Rhodospirillaceae | 0.0060 | Anaerolineaceae | 0.0057 |
| Opitutaceae | 0.0051 | Sphingomonadaceae | 0.0049 | Micrococcaceae | 0.0055 |
| Rhodospirillaceae | 0.0045 | Anaerolineaceae | 0.0049 | Burkholderiaceae | 0.0051 |
| Bacillaceae | 0.0044 | Burkholderiaceae | 0.0044 | Rhodospirillaceae | 0.0046 |
| Alteromonadaceae | 0.0044 | Acidobacteria | 0.0042 | Xanthomonadaceae | 0.0042 |
| | | Subgroup 4, | | | |
| | | unidentified family | | | |
| Xanthomonadaceae | 0.0040 | Opitutaceae | 0.0041 | Acidobacteria | 0.0035 |
| | | | | Subgroup 4, | |
| | | | | unidentified family | |
| Chromatiaceae | 0.0039 | Nitrosomonadaceae | 0.0033 | Sphingomonadaceae | 0.0034 |

TABLE HE
The following OTUs were found in all biological replicates of samples of plants grown from seeds treated
with Strain B, but not found in plants grown from seeds treated with Strain F or formulation control.

| | Tis- | Do- | | | | | |
|---|---|---|---|---|---|---|---|
| QTU | sue | main | Phylum | Class | Order | Family | Genus |
| B1.0\|REF97_V4\|126313 | leaf | Bacteria | Chloroflexi | Anaerolineae | Anaerolineales | Anaerolineaceae | |
| B1.0\|REF97_V4\|24209 | leaf | Bacteria | Proteobacteria | Alphaproteobacteria | Sphingomonadales | Erythro- | Erythrobacter |
| | | | | | | bacteraceae | |
| B1.0\|REF97_V4\|244563 | leaf | Bacteria | Proteobacteria | Gammaproteobacteria | Order_Incer- | Family_Incer- | Marinicella |
| | | | | | tae_Sedis | tae_Sedis | |
| B1.0\|REF97_V4\|30291 | leaf | Bacteria | Proteobacteria | Gammaproteobacteria | Xanthomonadales | | |
| B1.0\|REF97_V4\|33060 | leaf | Bacteria | Actinobacteria | Acidimicrobiia | Acidimicrobiales | lamiaceae | lamia |
| B1.0\|REF97_V4\|42838 | leaf | Bacteria | Chloroflexi | KD4-96 | | | |
| B1.0\|REF97_V4\|44325 | leaf | Bacteria | Proteobacteria | Alphaproteobacteria | Caulobacterales | Hyphomonadaceae | Hirschia |
| B1.0\|REF97_V4\|58280 | leaf | Bacteria | Proteobacteria | Alphaproteobacteria | Caulobacterales | Hyphomonadaceae | Hirschia |
| B1.0\|REF99_V4\|112628 | leaf | Bacteria | Proteobacteria | Gammaproteobacteria | Xanthomonadales | Xanthomonadaceae | Thermomonas |
| B1.0\|REF99_V4\|125928 | leaf | Bacteria | Proteobacteria | Betaproteobacteria | TRA3-20 | | |
| B1.0\|REF99_V4\|127439 | leaf | Bacteria | Gemma- | Gemm-1 | | | |
| | | | timonadetes | | | | |
| B1.0\|REF99_V4\|13061 | leaf | Bacteria | Verrucomicrobia | Opitutae | Opitutales | Opitutaceae | Opitutus |
| B1.0\|REF99_V4\|147488 | leaf | Bacteria | Chloroflexi | Anaerolineae | Anaerolineales | Anaerolineaceae | |
| B1.0\|REF99_V4\|16720 | leaf | Bacteria | Chloroflexi | Anaerolineae | Anaerolineales | Anaerolineaceae | |
| B1.0\|REF99_V4\|217009 | leaf | Bacteria | Acidobacteria | Acidobacteria | Subgroup_6 | | |
| B1.0\|REF99_V4\|217669 | leaf | Bacteria | Planctomycetes | Planctomycetacia | Planctomycetales | Planctomycetaceae | |
| B1.0\|REF99_V4\|2218 | leaf | Bacteria | Actinobacteria | Actinobacteria | Propionibacteriales | Nocardioidaceae | Nocardioides |
| B1.0\|REF99_V4\|231107 | leaf | Bacteria | Proteobacteria | Gammaproteobacteria | Oceanospirillales | Oceanospirillaceae | Pseudospirillum |
| B1.0\|REF99_V4\|26043 | leaf | Bacteria | Actinobacteria | Actinobacteria | Micrococcales | Microbacteriaceae | Schumannella |
| B1.0\|REF99_V4\|30882 | leaf | Bacteria | Proteobacteria | Gammaproteobacteria | Xanthomonadales | Solimonadaceae | Fontimonas |
| B1.0\|REF99_V4\|3454 | leaf | Bacteria | Proteobacteria | Alphaproteobacteria | Rhizobiales | Xanthobacteraceae | |
| B1.0\|REF99_V4\|4087 | leaf | Bacteria | Proteobacteria | Alphaproteobacteria | Sphingomonadales | Sphingomonadaceae | Novosphingobium |
| B1.0\|REF99_V4\|4443 | leaf | Bacteria | Proteobacteria | Gammaproteobacteria | Xanthomonadales | | |
| B1.0\|REF99_V4\|7734 | leaf | Bacteria | Actinobacteria | Actinobacteria | Micrococcales | Microbacteriaceae | Lysinimonas |
| B1.0\|REF99_V4\|78003 | leaf | Bacteria | Proteobacteria | Alphaproteobacteria | Rhizobiales | Xanthobacteraceae | Pseudolabrys |
| B1.0\|REF99_V4\|7892 | leaf | Bacteria | Proteobacteria | Alphaproteobacteria | Sphingomonadales | Sphingomonadaceae | Sphingomonas |
| B1.0\|SYM97_V4\|694 | leaf | Bacteria | Planctomycetes | OM190 | agg27 | | |
| B1.0\|REF97_V4\|10576 | root | Bacteria | Bacteroidetes | Flavobacteriia | Flavobacteriales | Flavobacteriaceae | |
| B1.0\|REF97_V4\|137844 | root | Bacteria | Proteobacteria | Gammaproteobacteria | Xanthomonadales | Xanthomonadaceae | |
| B1.0\|REF97_V4\|145009 | root | Bacteria | Proteobacteria | Deltaproteobacteria | Myxococcales | | |
| B1.0\|REF97_V4\|214952 | root | Bacteria | Verrucomicrobia | Opitutae | Opitutales | Opitutaceae | Opitutus |
| B1.0\|REF97_V4\|66257 | root | Bacteria | Acidobacteria | Acidobacteria | Subgroup_17 | | |
| B1.0\|REF97_V4\|74770 | root | Bacteria | Firmicutes | Erysipelotrichia | Erysipelotrichales | Erysipelotrichaceae | Asteroleplasma |
| B1.0\|REF97_V4\|76872 | root | Bacteria | Proteobacteria | Gammaproteobacteria | Xanthomonadales | Xanthomonadaceae | Stenotrophomonas |
| B1.0\|REF99_V4\|10645 | root | Bacteria | Proteobacteria | Gammaproteobacteria | Pseudomonadales | Pseudomonadaceae | Pseudomonas |
| B1.0\|REF99_V4\|109230 | root | Bacteria | Proteobacteria | Alphaproteobacteria | Rhodospirillales | Rhodospirillaceae | Defluviicoccus |
| B1.0\|REF99_V4\|122980 | root | Bacteria | Acidobacteria | Acidobacteria | Subgroup_3 | PAUC26f | |
| B1.0\|REF99_V4\|139185 | root | Bacteria | Proteobacteria | Deltaproteobacteria | Myxococcales | | |
| B1.0\|REF99_V4\|142 | root | Bacteria | Proteobacteria | Gammaproteobacteria | Pseudomonadales | Pseudomonadaceae | Pseudomonas |
| B1.0\|REF99_V4\|148539 | root | Bacteria | Bacteroidetes | Flavobacteriia | Flavobacteriales | Cryomorphaceae | Fluviicola |
| B1.0\|REF99_V4\|151 | root | Bacteria | Firmicutes | Bacilli | Bacillales | Bacillaceae | Bacillus |
| B1.0\|REF99_V4\|191 | root | Bacteria | Proteobacteria | Alphaproteobacteria | Rhizobiales | Bradyrhizobiaceae | Bradyrhizobium |
| B1.0\|REF99_V4\|1984 | root | Bacteria | Actinobacteria | Actinobacteria | Micromonosporales | Micro- | Actinoplanes |
| | | | | | | monosporaceae | |
| B1.0\|REF99_V4\|199235 | root | Bacteria | Proteobacteria | Betaproteobacteria | | | |
| B1.0\|REF99_V4\|211 | root | Bacteria | Actinobacteria | Actinobacteria | Streptomycetales | Streptomycetaceae | Streptomyces |
| B1.0\|REF99_V4\|28603 | root | Bacteria | Actinobacteria | Actinobacteria | Streptomycetales | Streptomycetaceae | Streptomyces |
| B1.0\|REF99_V4\|33692 | root | Bacteria | Proteobacteria | Betaproteobacteria | Burkholderiales | Comamonadaceae | |
| B1.0\|REF99_V4\|49912 | root | Bacteria | Proteobacteria | Gammaproteobacteria | Alteromonadales | Alteromonadaceae | Marinobacter |
| B1.0\|REF99_V4\|64 | root | Bacteria | Proteobacteria | Gammaproteobacteria | Pseudomonadales | Pseudomonadaceae | Pseudomonas |
| B1.0\|REF99_V4\|643 | root | Bacteria | Actinobacteria | Actinobacteria | Micrococcales | Micrococcaceae | Arthrobacter |
| B1.0\|REF99_V4\|74770 | root | Bacteria | Firmicutes | Erysipelotrichia | Erysipelotrichales | Erysipelotrichaceae | Asteroleplasma |
| B1.0\|REF99_V4\|88218 | root | Bacteria | Proteobacteria | Gammaproteobacteria | Alteromonadales | Alteromonadaceae | Glaciecola |
| B1.0\|SYM97_V4\|1685 | root | Bacteria | Proteobacteria | Gammaproteobacteria | | | |
| F1.0\|SYM97_ITS2\|1122 | root | Fungi | Ascomycota | Eurotiomycetes | Eurotiales | Frichocomaceae | Penicillium |
| F1.0\|SYM97_ITS2\|1601 | root | Fungi | Glomeromycota | Glomeromycetes | Glomerales | Glomeraceae | Rhizophagus |
| F1.0\|SYM97_ITS2\|1660 | root | Fungi | Glomeromycota | Glomeromycetes | Paraglomerales | Paraglomeraceae | Paraglomus |
| F1.0\|SYM97_ITS2\|662 | root | Fungi | Ascomycota | Dothideomycetes | Incertae sedis | Pseudeurotiaceae | Pseudeurotium |
| F1.0\|UDYN_ITS2\|460 | root | Fungi | Ascomycota | Dothideomycetes | Pleosporales | | |

TABLE 11F
The following OTUs were found to have significant differences in abundance between plants grown from
seeds treated with Strain B versus plants grown from seeds treated with the formulation control.

| | | | | For- | | | | | | |
|---|---|---|---|---|---|---|---|---|---|---|
| | tis- | Strain | Strain | mula- | King- | | | | | |
| OTU | sue | B | F | tion | dom | Phylum | Class | Order | Family | Genus |
| F1.0 | roots | 9423 | 84 | 0 | Fungi | Ascomycota | Dothideo- | Incertae sedis | Pseudeurotiaceae | Pseudeurotium |
| SYM97_ITS2 | | | | | | | mycetes | | | |
| 662 | | | | | | | | | | |
| B1.0 | leaf | 5166 | 872 | 0 | Bac- | Chloroflexi | Anaer- | | | |
| SYM97_V4 | | | | | teria | | olineae | | | |
| 2013 | | | | | | | | | | |
| B1.0 | leaf | 2997 | 0 | 0 | Bac- | Firmicutes | Clostridia | Clostridiales | Ruminococcaceae | |
| REF99_V4 | | | | | teria | | | | | |
| 120275 | | | | | | | | | | |
| B1.0 | leaf | 2904 | 1281 | 0 | Bac- | Proteo- | Alpha- | Sphin- | Sphin- | Sphingomonas |
| REF99_V4 | | | | | teria | bacteria | proteo- | gomonadales | gomonadaceae | |
| 7892 | | | | | | | bacteria | | | |
| B1.0 | leaf | 1968 | 0 | 0 | Bac- | Chloroflexi | KD4-96 | | | |
| REF97_V4 | | | | | teria | | | | | |
| 42838 | | | | | | | | | | |
| B1.0 | leaf | 2490 | 0 | 0 | Bac- | Proteo- | Alpha- | Sphin- | Erythro- | Altereryth- |
| REF99_V4 | | | | | teria | bacteria | proteo- | gomonadales | bacteraceae | robacter |
| 180402 | | | | | | | bacteria | | | |
| B1.0 | leaf | 3152 | 1722 | 0 | Bac- | Chloroflexi | Anaer- | SBR1031 | A4b | |
| REF99_V4 | | | | | teria | | olineae | | | |
| 144927 | | | | | | | | | | |
| B1.0 | leaf | 2645 | 131 | 0 | Bac- | Proteo- | Beta- | TRA3-20 | | |
| REF99_V4 | | | | | teria | bacteria | proteo- | | | |
| 125928 | | | | | | | bacteria | | | |
| B1.0 | leaf | 2416 | 204 | 0 | Bac- | Actino- | Acidimi- | Acidimi- | lamiaceae | lamia |
| REF97_V4 | | | | | teria | bacteria | crobiia | crobiales | | |
| 69488 | | | | | | | | | | |
| B1.0 | leaf | 2630 | 1300 | 0 | Bac- | Firmicutes | Bacilli | Bacillales | Paenibacillaceae | |
| REF99_V4 | | | | | teria | | | | | |
| 26508 | | | | | | | | | | |
| B1.0 | leaf | 6336 | 219 | 158 | Bac- | Chloroflexi | Anaer- | Anaerolineales | Anaerolineaceae | |
| REF99_V4 | | | | | teria | | olineae | | | |
| 16720 | | | | | | | | | | |
| F1.0 | root | 23400 | 5700 | 168 | Fungi | Ascomycota | Sordario- | Sordariales | Lasiosphaeriaceae | Podospora |
| U97_ITS2 | | | | | | | mycetes | | | |
| 425 | | | | | | | | | | |
| F1.0 | root | 59809 | 1805 | 1576 | Fungi | Ascomycota | Sordario- | Chae- | Chae- | Codinaeopsis |
| SYM97_ITS2 | | | | | | | mycetes | tosphaeriales | tosphaeriaceae | |
| 1288 | | | | | | | | | | |
| F1.0 | root | 36851 | 4247 | 1175 | Fungi | Glom- | Glomero- | Glomerales | Glomeraceae | Rhizophagus |
| SYM97_ITS2 | | | | | | eromycota | mycetes | | | |
| 1548 | | | | | | | | | | |
| F1.0 | root | 464106 | 50464 | 31780 | Fungi | Glom- | Glomero- | Glomerales | Glomeraceae | Rhizophagus |
| SYM97_ITS2 | | | | | | eromycota | mycetes | | | |
| 1518 | | | | | | | | | | |
| B1.0 | root | 1754 | 426 | 247 | Bac- | Proteo- | Gamma- | Alteromonadales | Alteromonadaceae | Glaciecola |
| REF99_V4 | | | | | teria | bacteria | proteo- | | | |
| 88218 | | | | | | | bacteria | | | |
| B1.0 | root | 5866 | 17608 | 20295 | Bac- | Proteo- | Beta- | Burkholderiales | Burkholderiaceae | Candida- |
| SYM97_V4 | | | | | teria | bacteria | proteo- | | | tus_Glomeribacter |
| 231 | | | | | | | bacteria | | | |
| B1.0 | root | 548 | 417 | 2711 | Bac- | Proteo- | Gamma- | Entero- | Entero- | Klebsiella |
| REF99_V4 | | | | | teria | bacteria | proteo- | bacteriales | bacteriaceae | |
| 1 | | | | | | | bacteria | | | |
| B1.0 | leaf | 18 | 3199 | 2229 | Bac- | Chloroflexi | Anaer- | | | |
| SYM97_V4 | | | | | teria | | olineae | | | |
| 455 | | | | | | | | | | |
| B1.0 | leaf | 54 | 15017 | 8129 | Bac- | Proteo- | Alpha- | Rhizobiales | Rhizobiaceae | Rhizobium |
| REF99_V4 | | | | | teria | bacteria | proteo- | | | |
| 142567 | | | | | | | bacteria | | | |
| B1.0 | leaf | 0 | 1976 | 1805 | Bac- | Proteo- | Beta- | Burkholderiales | Comamonadaceae | Comamonas |
| REF99_V4 | | | | | teria | bacteria | proteo- | | | |
| 660 | | | | | | | bacteria | | | |
| B1.0 | leaf | 0 | 708 | 2454 | Bac- | Proteo- | Gamma- | | | |
| SYM97_V4 | | | | | teria | bacteria | proteo- | | | |
| 2277 | | | | | | | bacteria | | | |
| B1.0 | leaf | 0 | 0 | 3990 | Bac- | Firmicutes | | | | |
| SYM97_V4 | | | | | teria | | | | | |
| 1678 | | | | | | | | | | |
| B1.0 | leaf | 0 | 0 | 4108 | Bac- | Chloroflexi | Anaer- | H39 | | |
| REF97_V4 | | | | | teria | | olineae | | | |
| 241577 | | | | | | | | | | |

TABLE 11G
The average abundance of bacterial genera, as a proportion of the microbial
community, in root tissue of water stressed soybean plants grown from seeds treated
with the control Penicillium endophyte Strain F, the beneficial Penicillium
endophyte Strain B, and formulation control are shown.

| | | | | | Formulation |
|---|---|---|---|---|---|
| Genus | Strain B | Genus | Strain F | Genus | Control |
| Bradyrhizobium | 0.1310 | Bradyrhizobium | 0.0832 | Bradyrhizobium | 0.1989 |
| Cellvibrio | 0.0872 | Cellvibrio | 0.0787 | Cellvibrio | 0.0620 |
| Flavobacterium | 0.0479 | Flavobacterium | 0.0533 | Flavobacterium | 0.0548 |
| Piscinibacter | 0.0284 | Methylotenera | 0.0356 | Methylotenera | 0.0294 |
| Methylotenera | 0.0283 | Massilia | 0.0336 | Rhizobium | 0.0219 |
| Rhizobium | 0.0217 | Piscinibacter | 0.0264 | Piscinibacter | 0.0199 |
| Pseudomonas | 0.0212 | Rhizobium | 0.0243 | Hydrogenophaga | 0.0180 |
| Hydrogenophaga | 0.0208 | Hydrogenophaga | 0.0231 | Asticcacaulis | 0.0177 |
| Ohtaekwangia | 0.0197 | Pseudomonas | 0.0212 | Ohtaekwangia | 0.0164 |
| Devosia | 0.0140 | Ohtaekwangia | 0.0180 | Massilia | 0.0136 |
| Asticcacaulis | 0.0139 | Asticcacaulis | 0.0174 | Pseudomonas | 0.0128 |
| Massilia | 0.0137 | Devosia | 0.0133 | Dyadobacter | 0.0124 |
| Streptomyces | 0.0134 | Streptomyces | 0.0112 | Devosia | 0.0120 |
| Methylibium | 0.0080 | Dyadobacter | 0.0103 | Streptomyces | 0.0097 |
| Acidovorax | 0.0077 | Acidovorax | 0.0095 | Niastella | 0.0089 |
| Shinella | 0.0075 | Niastella | 0.0083 | Rheinheimera | 0.0069 |
| Dyadobacter | 0.0062 | Shinella | 0.0077 | Acidovorax | 0.0065 |
| Niastella | 0.0059 | Leptothrix | 0.0067 | Methylibium | 0.0056 |
| Arthrobacter | 0.0058 | Methylibium | 0.0064 | Arthrobacter | 0.0055 |
| Pseudorhodoferax | 0.0051 | Arthrobacter | 0.0063 | Shinella | 0.0052 |

TABLE 11H
The average abundance of fungal families, as a proportion of the microbial community, in root tissue
of water stressed soybean plants grown from seeds treated with the control Penicillium endophyte
Strain F, the beneficial Penicillium endophyte Strain B, and formulation control are shown.

| | | | | | Formulation |
|---|---|---|---|---|---|
| Family | Strain B | Family | Strain F | Family | Control |
| Glomeraceae | 0.4383 | Glomeraceae | 0.2573 | Glomeraceae | 0.2825 |
| Claroideoglomeraceae | 0.1611 | Nectriaceae | 0.2098 | Claroideoglomeraceae | 0.2156 |
| Nectriaceae | 0.1351 | Claroideoglomeraceae | 0.2038 | Olpidiaceae | 0.2040 |
| Lasiosphaeriaceae | 0.0666 | Olpidiaceae | 0.1390 | Nectriaceae | 0.1374 |
| Olpidiaceae | 0.0504 | Lasiosphaeriaceae | 0.0573 | Lasiosphaeriaceae | 0.0658 |
| Hypocreales, | 0.0199 | Psathyrellaceae | 0.0165 | Hypocreales, | 0.0171 |
| unidentified family | | | | unidentified family | |
| Chaetosphaeriaceae | 0.0150 | Bolbitiaceae | 0.0145 | Chaetomiaceae | 0.0068 |
| Chaetomiaceae | 0.0078 | Chaetomiaceae | 0.0058 | Ceratocystidaceae | 0.0036 |
| Halosphaeriaceae | 0.0044 | Halosphaeriaceae | 0.0057 | Auriculariales, | 0.0035 |
| | | | | unidentified family | |
| Bolbitiaceae | 0.0042 | Hypocreales, | 0.0038 | Psathyrellaceae | 0.0033 |
| | | unidentified family | | | |
| Pleosporales, | 0.0032 | Davidiellaceae | 0.0034 | Halosphaeriaceae | 0.0019 |
| unidentified family | | | | | |
| Lophiostomataceae | 0.0031 | Paxillaceae | 0.0032 | Bionectriaceae | 0.0019 |
| Ceratocystidaceae | 0.0029 | Helotiales, | 0.0026 | Paraglomeraceae | 0.0016 |
| | | unidentified family | | | |
| Ambisporaceae | 0.0024 | Pleosporales, | 0.0024 | Dothioraceae | 0.0015 |
| | | unidentified family | | | |
| Pseudeurotiaceae | 0.0024 | Bionectriaceae | 0.0021 | Helotiales, | 0.0010 |
| | | | | unidentified family | |
| Davidiellaceae | 0.0023 | Montagnulaceae | 0.0021 | Agaricaceae | 0.0007 |
| Bionectriaceae | 0.0023 | Eremotheciaceae | 0.0018 | Paraglomerales, | 0.0007 |
| | | | | unidentified family | |
| Glomerales, | 0.0016 | Hypocreaceae | 0.0016 | Clavicipitaceae | 0.0007 |
| unidentified family | | | | | |
| Paraglomeraceae | 0.0015 | Agaricaceae | 0.0012 | Archaeosporaceae | 0.0006 |
| Trichocomaceae | 0.0013 | Auriculariales, | 0.0012 | Eremotheciaceae | 0.0005 |
| | | unidentified family | | | |

### Table 12: Field Trial Results

TABLE 12A
Soybean field trial results. No negative impact on soybean
plants grown from seeds treated with Strain B was observed
during well-watered field trial conditions.

| | Average across 1 location | | |
|---|---|---|---|
| | Harvest Yield | Weight | |
| Treatment | bu/ac | lb/2row | Moisture % |
| Variety 1_Formulation | 63.34 | 17.44 | 12.94 |
| Variety 1_Strain B | 61.93 | 17.08 | 13.09 |
| Variety 2_Formulation | 61.98 | 17.12 | 13.24 |
| Variety 2_Strain B | 62.33 | 17.18 | 13.05 |

TABLE 12B
Maize field trial results. No negative impact on maize
plants grown from seeds treated with Strain B was observed
during well-watered field trial conditions.

Average across 2 locations

| | Combine Moisture | Combine |
|---|---|---|
| Treatment | (%) | Test Wt |
| Variety1_Formulation | 26.20 | 54.87 |
| Variety1_Strain B | 26.10 | 54.60 |
| Variety2_Formulation | 29.08 | 51.94 |
| Variety2_Strain B | 29.04 | 52.58 |

### REFERENCES

[0846] Abarenkov, K., Henrik Nilsson, R., Larsson, K.-H., Alexander, I. J., Eberhardt, U., Erland, S., . . . Koljalg, U. (2010, April). The UNITE database for molecular identification of fungi—recent updates and future perspectives. The New Phytologist. England.
[0847] Agudelo-Romero, P., Erban, A., Sousa, L., Pais, M. S., Kopka, J., and Fortes, A. M. (2013). Search for Transcriptional and Metabolic Markers of Grape Pre-Ripening and Ripening and Insights into Specific Aroma Development in Three Portuguese Cultivars. PLoS ONE 8, e60422.
[0848] Albers, E. (2009). Metabolic characteristics and importance of the universal methionine salvage pathway recycling methionine from 5′-methylthioadenosine. IUBMB Life 61, 1132-1142.
[0849] Albrigo, L. Gene; Aritua, Valente; Wang, Nian; & Achor, Diann. (2014). Phloem disruption from HLB infection in canopy and root framework. Journal of Citrus Pathology, 1(1).
[0850] Allen, J. F. (2004). Cytochrome b6f: structure for signalling and vectorial metabolism. Trends Plant Sci. 9, 130-137.
[0851] Amann et al. (2001) Current Opinion in Biotechnology 12:231-236
[0852] Ambrose, K. V. and Belanger, F. C., 2012. SOLiD-SAGE of endophyte-infected red fescue reveals numerous effects on host transcriptome and an abundance of highly expressed fungal secreted proteins. PLoS One, 7(12), p.e53214.
[0853] Ana Victoria Garcia, Mohamed Al-Yousif, Heribert Hirt. 2012. Role of AGC kinases in plant growth and stress responses. Cellular and Molecular Life Sciences. 69(19):3259-67.
[0854] Anderson, J., Chow, W., and Goodchild, D. (1988). Thylakoid Membrane Organisation in Sun/Shade Acclimation. Funct. Plant Biol. 15, 11-26.
[0855] Andersson, M. X., Hamberg, M., Kourtchenko, O., Brunnstrom, A., McPhail, K. L., Gerwick, W. H., Göbel, C., Feussner, I., and Ellerstrom, M. (2006). Oxylipin profiling of the hypersensitive response in Arabidopsis thaliana. Formation of a novel oxo-phytodienoic acid-containing galactolipid, arabidopside E. J. Biol. Chem. 281, 31528-31537.
[0856] Angelini, R., Bragaloni, M., Federico, R., Infantino, A., and Porta-Pugua, A. (1993). Involvement of Polyamines, Diamine Oxidase and Peroxidase in Resistance of Chickpea to Ascochyta rabiei. J. Plant Physiol. 142, 704-709.
[0857] Antunes, F., Aguilar, M., Pineda, M., and Sodek, L. (2008). Nitrogen stress and the expression of asparagine synthetase in roots and nodules of soybean (Glycine max). Physiol. Plant. 133, 736-743.
[0858] Appleby, C. A. (1984). Leghemoglobin and Rhizobium respiration. Annu. Rev. Plant Physiol. 35, 443-478.
[0859] Arnaud, N., Ravet, K., Borlotti, A., Touraine, B., Boucherez, J., Fizames, C., Briat, J.-F., Cellier, F., and Gaymard, F. (2007). The iron-responsive element (IRE)/iron-regulatory protein 1 (IRP1)-cytosolic aconitase iron-regulatory switch does not operate in plants. Biochem. J. 405, 523.
[0860] Aviezer-Hagai, K., Skovorodnikova, J., Galigniana, M., Farchi-Pisanty, O., Maayan, E., Bocovza, S., Efrat, Y., Koskull-Döring, P. von, Ohad, N., and Breiman, A. (2006). Arabidopsis immunophilins ROF1 (AtFKBP62) and ROF2 (AtFKBP65) exhibit tissue specificity, are heat-stress induced, and bind HSP90. Plant Mol. Biol. 63, 237-255.
[0861] Azuma, Y., Yamagishi, M., Ueshima, R., and Ishihama, A. (1991). Cloning and sequence determination of the Schizosaccharomyces pombe rpb 1 gene encoding the largest subunit of RNA polymerase II. Nucleic Acids Res. 19, 461-468.
[0862] Bais, H. P., and Ravishankar, G. A. (2002). Role of polyamines in the ontogeny of plants and their biotechnological applications. Plant Cell Tissue Organ Cult. 69, 1-34.
[0863] Baker, J., dennSteele, C. V., and Iii, L. D. (1988). Sequence and characterization of 6 Lea proteins and their genes from cotton. Plant Mol. Biol. 11, 277-291.
[0864] Balmer, Y., Vensel, W. H., Cai, N., Manieri, W., Schürmann, P., Hurkman, W. J., and Buchanan, B. B. (2006). A complete ferredoxin/thioredoxin system regulates fundamental processes in amyloplasts. Proc. Natl. Acad. Sci. U.S.A 103, 2988-2993.
[0865] Bargmann, B. O. R., and Munnik, T. (2006). The role of phospholipase D in plant stress responses. Curr. Opin. Plant Biol. 9, 515-522.
[0866] Barka et al. 2006, Appl. Environ. Microbiol. 72:7246-7252
[0867] Bartsch, M., Kimura, M., and Subramanian, A.-R. (1982). Purification, primary structure, and homology relationships of a chloroplast ribosomal protein. Proc. Natl. Acad. Sci. 79, 6871-6875
[0868] Batista-Santos, P., Lidon, F. C., Fortunato, A., Leitao, A. E., Lopes, E., Partelli, F., Ribeiro, A. I., and Ramalho, J. C. (2011). The impact of cold on photosynthesis in genotypes of Coffea spp.—Photosystem sensitivity, photoprotective mechanisms and gene expression. J. Plant Physiol. 168, 792-806.
[0869] Beckers, G. J. M., and Spoel, S. H. (2006). Fine-Tuning Plant Defence Signalling: Salicylate versus Jasmonate. Plant Biol. 8, 1-10.
[0870] Begum, A. A., Leibovitch, S., Migner, P., and Zhang, F. 2001. Specific flavonoids induced nod gene expression and pre-activated nod genes of Rhizobium leguminosarum increased pea (Pisum sativum L.) and lentil (Lens culinaris L.) nodulation in controlled growth chamber environments. J. Exp. Bot. 52, (360) 1537-1543.
[0871] Ben-Shem, A., Loubresse, N. G. de, Melnikov, S., Jenner, L., Yusupova, G., and Yusupov, M.
[0872] (2011). The Structure of the Eukaryotic Ribosome at 3.0 Å Resolution. Science 334, 1524-1529
[0873] Ben-Shem, A., Loubresse, N. G. de, Melnikov, S., Jenner, L., Yusupova, G., and Yusupov, M. (2011). The Structure of the Eukaryotic Ribosome at 3.0 Å Resolution. Science 334, 1524-1529.
[0874] Berger, S., Bell, E., Sadka, A., and Mullet, J. E. (1995). Arabidopsis thaliana Atvsp is homologous to soybean VspA and VspB, genes encoding vegetative storage protein acid phosphatases, and is regulated similarly by methyl jasmonate, wounding, sugars, light and phosphate. Plant Mol. Biol. 27, 933-942.
[0875] Bissoli, G., Niñoles, R., Fresquet, S., Palombieri, S., Bueso, E., Rubio, L., Garcia-Sánchez, M. J., Fernández, J. A., Mulet, J. M., and Serrano, R. (2012). Peptidyl-prolyl cis-trans isomerase ROF2 modulates intracellular pH homeostasis in Arabidopsis. Plant J. 70, 704-716.
[0876] Blatch, G. L. and Lässie, M. (1999). The tetratricopeptide repeat: a structural motif mediating protein-protein interactions. Bioessays. 21: 932-939.
[0877] Bordiec, S., Paquis, S., Lacroix, H., Dhondt, S., Ait Barka, E., Kauffmann, S., Jeandet, P., Mazeyrat-Gourbeyre, F., Clement, C., Baillieul, F., et al. (2011). Comparative analysis of defence responses induced by the endophytic plant growth-promoting rhizobacterium Burkholderia phytofirmans strain PsJN and the non-host bacterium Pseudomonas syringae pv. pisi in grapevine cell suspensions. J. Exp. Bot. 62, 595-603.
[0878] Boursiac, Y., Lee, S. M., Romanowsky, S., Blank, R., Sladek, C., Chung, W. S., and Harper, J. F. (2010). Disruption of the Vacuolar Calcium-ATPases in Arabidopsis Results in the Activation of a Salicylic Acid-Dependent Programmed Cell Death Pathway. Plant Physiol. 154, 1158-1171.
[0879] Bradley, D. J., Kjellbom, P., and Lamb, C. J. (1992). Elicitor- and wound-induced oxidative cross-linking of a proline-rich plant cell wall protein: A novel, rapid defense response. Cell 70, 21-30.
[0880] Brakhage, A. A., 2013. Regulation of fungal secondary metabolism. Nature Reviews Microbiology, 11(1), pp. 21-32.
[0881] Briat, J.-F., Ravet, K., Arnaud, N., Duc, C., Boucherez, J., Touraine, B., Cellier, F., and
[0882] Gaymard, F. (2010). New insights into ferritin synthesis and function highlight a link between iron homeostasis and oxidative stress in plants. Ann. Bot. 105, 811-822.
[0883] Brisson, L. F., Tenhaken, R., and Lamb, C. (1994). Function of Oxidative Cross-Linking of Cell Wall Structural Proteins in Plant Disease Resistance. Plant Cell 6, 1703-1712.
[0884] Brocker, C., Vasiliou, M., Carpenter, S., Carpenter, C., Zhang, Y., Wang, X., Kotchoni, S. O., Wood, A. J., Kirch, H.-H., Kopečný, D., et al. (2013). Aldehyde dehydrogenase (ALDH) superfamily in plants: gene nomenclature and comparative genomics. Planta 237, 189-210.
[0885] Bruce, R. J., and West, C. A. (1989). Elicitation of Lignin Biosynthesis and Isoperoxidase Activity by Pectic Fragments in Suspension Cultures of Castor Bean. Plant Physiol. 91, 889-897.
[0886] Buchanan, B. (1980). Role of Light in the Regulation of Chloroplast Enzymes. Annu. Rev. Plant Physiol. Plant Mol. Biol. 31, 341-374.
[0887] Burd et al. 2000, Can. J. Microbiol. 46:237-245
[0888] Bustin, M., and Reeves, R. (1996). High-Mobility-Group Chromosomal Proteins: Architectural Components That Facilitate Chromatin Function. In Progress in Nucleic Acid Research and Molecular Biology, W. E. C. and K. Moldave, ed. (Academic Press), pp. 35-100b.
[0889] Büttner, M. (2010). The Arabidopsis sugar transporter (AtSTP) family: an update. Plant Biol. 12, 35-41.
[0890] Caffall, K. H., and Mohnen, D. (2009). The structure, function, and biosynthesis of plant cell wall pectic polysaccharides. Carbohydr. Res. 344, 1879-1900.
[0891] Cao J. 2012. The Pectin Lyases in Arabidopsis thaliana: Evolution, Selection and Expression Profiles. PLoS One, 7(10): e46944.
[0892] Capaldi, R. A. (1990). Structure and Function of Cytochrome c Oxidase. Annu. Rev. Biochem. 59, 569-596.
[0893] Caplan, J., Padmanabhan, M., and Dinesh-Kumar, S. P. (2008). Plant NB-LRR Immune Receptors: From Recognition to Transcriptional Reprogramming. Cell Host Microbe 3, 126-135
[0894] Carpita, N. C., and Gibeaut, D. M. (1993). Structural models of primary cell walls in flowering plants: consistency of molecular structure with the physical properties of the walls during growth. Plant J. 3, 1-30.
[0895] Carvalho, A. de O., and Gomes, V. M. (2007). Role of plant lipid transfer proteins in plant cell physiology—A concise review. Peptides 28, 1144-1153.
[0896] Carvalho, G. A. B. de, Batista, J. S. S., Marcelino-Guimardes, F. C., Nascimento, L. C. do, and Hungria, M. (2013). Transcriptional analysis of genes involved in nodulation in soybean roots inoculated with Bradyrhizobium japonicum strain CPAC 15. BMC Genomics 14, 153.
[0897] Cawthorn, T. R., Moreno, J. C., Dharsee, M., Tran-Thanh, D., Ackloo, S., Zhu, P. H., Sardana, G., Chen, J., Kupchak, P., Jacks, L. M., et al. (2012). Proteomic Analyses Reveal High Expression of Decorin and Endoplasmin (HSP90B1) Are Associated with Breast Cancer Metastasis and Decreased Survival. PLoS ONE 7, e30992.
[0898] Ceccaroli, P., Buffalini, M., Saltarelli, R., Barbieri, E., Polidori, E., Ottonello, S., Kohler, A., Tisserant, E., Martin, F. and Stocchi, V., 2011. Genomic profiling of carbohydrate metabolism in the ectomycorrhizal fungus Tuber melanosporum. New Phytologist, 189(3), pp. 751-764.
[0899] Cha et al. (1998), Mol Plant-Microbe Interact 11:1119-1129
[0900] Cha, J.-Y., Su'udi, M., Kim, W.-Y., Kim, D. R., Kwak, Y.-S., and Son, D. (2012). Functional characterization of orchardgrass cytosolic Hsp70 (DgHsp70) and the negative regulation by Ca2+/AtCaM2 binding. Plant Physiol. Biochem. 58, 29-36.
[0901] Chen, B., Zhong, D., and Monteiro, A. (2006). Comparative genomics and evolution of the HSP90 family of genes across all kingdoms of organisms. BMC Genomics 7, 156.
[0902] Chen, H., McCaig, B. C., Melotto, M., He, S. Y., and Howe, G. A. (2004). Regulation of Plant Arginase by Wounding, Jasmonate, and the Phytotoxin Coronatine. J. Biol. Chem. 279, 45998-46007.
[0903] Chen, L., Ding, C., Zhao, X., Xu, J., Mohammad, A. A., Wang, S., and Ding, Y. (2014). Differential regulation of proteins in rice (Oryza sativa L.) under iron deficiency. Plant Cell Rep. 34, 83-96.
[0904] Cheng Wang, HaiFeng Chen, QingNan Hao, AiHua Sha, ZhiHui Shan, LiMiao Chen, Rong Zhou, HaiJian Zhi, XinAn Zhou. 2012. Transcript Profile of the Response of Two Soybean Genotypes to Potassium Deficiency. PLOS One. Published: Jul. 5, 2012. Accessed: May 27, 2016. <http://dx.doi.org/10.1371/journal.pone.0039856>
[0905] Cheong, Y. H., Chang, H., Gupta, R., Wang, X., Zhu, T., Luan, S. 2002. Transcriptional profiling reveals novel interactions between wounding, pathogen, abiotic stress, and hormonal responses in Arabidopsis. Plant Physiol. 129, 661-677.
[0906] Chern, M., Bai, W., Chen, X., Canlas, P. E., and Ronald, P. C. (2013). Reduced expression of glycolate oxidase leads to enhanced disease resistance in rice. PeerJ 1, e28.
[0907] Chernin et al. (1998) J Bacteriol 180:4435-4441
[0908] Chihaoui, S.-A., Mhadhbi, H., and Mhamdi, R. (2012). The antibiosis of nodule-endophytic agrobacteria and its potential effect on nodule functioning of Phaseolus vulgaris. Arch. Microbiol. 194, 1013-1021.
[0909] Chipman, D., Barak, Z., and Schloss, J. V. (1998). Biosynthesis of 2-aceto-2-hydroxy acids: acetolactate synthases and acetohydroxyacid synthases. Biochim. Biophys. Acta 1385, 401-419.
[0910] Choi et al. 2001, Planta 213:45-50
[0911] Chrisostomos Prodromou, Giuliano Siligardi, Ronan O'Brien, Derek N. Woolfson, Lynne Regan, Barry Panaretou, John E. Ladbury, Peter W. Piper, Laurence H. Pearl. 1999. Regulation of Hsp90 ATPase activity by tetratricopeptide repeat (TPR)-domain co-chaperones. The EMBO Journal. 18(3):754-62.
[0912] Christ, B., Süssenbacher, I., Moser, S., Bichsel, N., Egert, A., Müller, T., Kräutler, B., and Hörtensteiner, S. (2013). Cytochrome P450 CYP89A9 Is Involved in the Formation of Major Chlorophyll Catabolites during Leaf Senescence in Arabidopsis. Plant Cell 25, 1868-1880.
[0913] Christensen, S., Kaplan, F., Huffaker, A., Sims, J., Doehlemann, G., Teal, P., and Schmelz, E. (2015). The maize death acids, 10-oxo-11-phytoenoic acid and derivatives, demonstrate specificity in jasmonate-related signaling and defense. In 57th Annual Maize Genetics Conference, (Pheasant Run, St. Charles, Ill.).
[0914] Chung, H.-J., and Ferl, R. J. (1999). Arabidopsis Alcohol Dehydrogenase Expression in Both Shoots and Roots Is Conditioned by Root Growth Environment. Plant Physiol. 121, 429-436.
[0915] Churin, Y., Schilling, S., and Börner, T. (1999). A gene family encoding glutathione peroxidase homologues in Hordeum vulgare (barley)1. FEBS Lett. 459, 33-38.
[0916] Colletti, K. S., Tattersall, E. A., Pyke, K. A., Froelich, J. E., Stokes, K. D., and Osteryoung, K. W. (2000). A homologue of the bacterial cell division site-determining factor MinD mediates placement of the chloroplast division apparatus. Curr. Biol. 10, 507-516.
[0917] Compant, S., Reiter, B., Sessitsch, A., Nowak, J., Clément, C., and Ait Barka, E. (2005). Endophytic colonization of Vitis vinifera L. by plant growth-promoting bacterium Burkholderia sp. strain PsJN. Appl. Environ. Microbiol. 71, 1685-1693.
[0918] Cook, C. M., Daudi, A., Millar, D. J., Bindschedler, L. V., Khan, S., Bolwell, G. P., and Devoto, A. (2012). Transcriptional changes related to secondary wall formation in xylem of transgenic lines of tobacco altered for lignin or xylan content which show improved saccharification. Phytochemistry 74, 79-89.
[0919] Córdoba-Cañero, D., Dubois, E., Ariza, R. R., Doutriaux, M.-P., and Roldán-Arjona, T. (2010). Arabidopsis Uracil DNA Glycosylase (UNG) Is Required for Base Excision Repair of Uracil and Increases Plant Sensitivity to 5-Fluorouracil. J. Biol. Chem. 285, 7475-7483.
[0920] Cosgrove, D. J. (2000). Loosening of plant cell walls by expansins. Nature 407, 321-326.
[0921] Cox (1994) Methods Enzymol 235: 315-329
[0922] Crowell, D. N., John, M. E., Russell, D., and Amasino, R. M. (1992). Characterization of a stress-induced, developmentally regulated gene family from soybean. Plant Mol. Biol. 18, 459-466.
[0923] Cruz, J. A., Harfe, B., Radkowski, C. A., Dann, M. S., and McCarty, R. E. (1995). Molecular dissection of the epsilon subunit of the chloroplast ATP synthase of spinach. Plant Physiol. 109, 1379-1388.
[0924] Curi, G. C., Welchen, E., Chan, R. L., and Gonzalez, D. H. (2003). Nuclear and mitochondrial genes encoding cytochrome c oxidase subunits respond differently to the same metabolic factors. Plant Physiol. Biochem. 41, 689-693.
[0925] D. Xu, X. Duan, B. Wang, B. Hong, THD. Ho and R. Wu. 1996. Expression of a Late Embryogenesis Abundant Protein Gene, HVA1, from Barley Confers Tolerance to Water Deficit and Salt Stress in Transgenic Rice. Plant Physiology. 110(1):249-57.
[0926] Daniels et al., (2006). PNAS 103: 14965-14970
[0927] Dao, T. T. H., Linthorst, H. J. M., and Verpoorte, R. (2011). Chalcone synthase and its functions in plant resistance. Phytochem. Rev. 10, 397-412.
[0928] Dao, T. V., Nomura, M., Hamaguchi, R., Kato, K., Itakura, M., Minamisawa, K., Sinsuwongwat, S., Le, H. T.-P., Kaneko, T., Tabata, S., et al. (2008). NAD-Malic Enzyme Affects Nitrogen Fixing Activity of Bradyrhizobium japonicum USDA 110 Bacteroids in Soybean Nodules. Microbes Environ. 23, 215-220.
[0929] Davin, L. B., and Lewis, N. G. (2005). Dirigent phenoxy radical coupling: advances and challenges. Curr. Opin. Biotechnol. 16, 398-406.
[0930] De Luca, V. and St Pierre, B. 2000. The cell and developmental biology of alkaloid biosynthesis. Trends in Plant Science. 5, (4) 168-173.
[0931] De Maio, A. (1999). Heat shock proteins: facts, thoughts, and dreams. Shock Augusta Ga 11, 1-12.
[0932] Dennis and Webster 1971, Trans Brit Mycol Soc 57:25-39
[0933] Deshpande, N., Wilkins, M. R., Packer, N. and Nevalainen, H., 2008. Protein glycosylation pathways in filamentous fungi. Glycobiology, 18(8), pp. 626-637.
[0934] Desikan, R., Griffiths, R., Hancock, J., and Neill, S. (2002). A new role for an old enzyme: Nitrate reductase-mediated nitric oxide generation is required for abscisic acid-induced stomatal closure in Arabidopsis thaliana. Proc. Natl. Acad. Sci. 99, 16314-16318.
[0935] Devaiah, S. P., Roth, M. R., Baughman, E., Li, M., Tamura, P., Jeannotte, R., Welti, R., and Wang, X. (2006). Quantitative profiling of polar glycerolipid species from organs of wild-type Arabidopsis and a phospholipase Dalphal knockout mutant. Phytochemistry 67, 1907-1924.
[0936] Dhanapal, A. P., Ray, J. D., Singh, S. K., Hoyos-Villegas, V., Smith, J. R., Purcell, L. C., . . . & Fritschi, F. B. (2015). Genome-wide association analysis of diverse soybean genotypes reveals novel markers for nitrogen traits. The Plant Genome 8(3): 1-15
[0937] Di Pietro, A., González-Roncero, I., and Ruiz-Roldán, M. C. 2009. From tools of survival to weapons of destruction: The role of cell-wall degrading enzymes in plant infection. Plant Relationships. H. B. Deising, ed. Springer-Verlag, Berlin, pp. 275-306.
[0938] Ding, X., Cao, Y., Huang, L., Zhao, J., Xu, C., Li, X., and Wang, S. (2008). Activation of the Indole-3-Acetic Acid-Amido Synthetase GH3-8 Suppresses Expansin Expression and Promotes Salicylate- and Jasmonate-Independent Basal Immunity in Rice. Plant Cell 20, 228-240.
[0939] Dixon, R. A., and Paiva, N. L. (1995). Stress-Induced Phenylpropanoid Metabolism. Plant Cell 7, 1085-1097.
[0940] Donà, M., Macovei, A., Faè, M., Carbonera, D., and Balestrazzi, A. (2013). Plant hormone signaling and modulation of DNA repair under stressful conditions. Plant Cell Rep. 32, 1043-1052.
[0941] Dong, X. (2004). NPR1, all things considered. Curr. Opin. Plant Biol. 7, 547-552.
[0942] Kozich, J. J., Westcott, S. L., Baxter, N. T., Highlander, S. K., & Schloss, P. D. (2013). Development of a dual-index sequencing strategy and curation pipeline for analyzing amplicon sequence data on the miseq illumina sequencing platform. Applied and Environmental Microbiology, 79(17), 5112-5120.
[0943] Dupont, P. Y., Eaton, C. J., Wargent, J. J., Fechtner, S., Solomon, P., Schmid, J., Day, R. C.,
[0944] Scott, B. and Cox, M. P., 2015. Fungal endophyte infection of ryegrass reprograms host metabolism and alters development. New Phytologist, 208(4), pp. 1227-1240.
[0945] Eberhard et al., (1981). Biochemistry 20 (9): 2444-2449
[0946] el-Basyouni, S. Z., Chen, D., Ibrahim, R. K., Neish, A. C., and Towers, G. H. N. (1964). The biosynthesis of hydroxybenzoic acids in higher plants. Phytochemistry 3, 485-492.
[0947] Elliott, C., MüLler, J., Miklis, M., Bhat, R. A., Schulze-Lefert, P., and Panstruga, R. (2005). Conserved extracellular cysteine residues and cytoplasmic loop-loop interplay are required for functionality of the heptahelical MLO protein. Biochem. J. 385, 243.
[0948] Eriksson, S., Stransfeld, L., Adamski, N. M., Breuninger, H., and Lenhard, M. (2010). KLUH/CYP78A5-Dependent Growth Signaling Coordinates Floral Organ Growth in Arabidopsis. Curr. Biol. 20, 527-532.
[0949] Fang, Y., and Xiong, L. (2014). General mechanisms of drought response and their application in drought resistance improvement in plants. Cell. Mol. Life Sci. 72, 673-689.
[0950] Ferro, M., Brugière, S., Salvi, D., Seigneurin-Berny, D., Court, M., Moyet, L., Ramus, C., Miras, S., Mellal, M., Le Gall, S., et al. (2010). AT_CHLORO, a Comprehensive Chloroplast Proteome Database with Subplastidial Localization and Curated Information on Envelope Proteins. Mol. Cell. Proteomics MCP 9, 1063-1084.
[0951] Fiehn et al., (2000) Nature Biotechnol., 18, 1157-1161
[0952] Fink, A. L. (1999). Chaperone-Mediated Protein Folding. Physiol. Rev. 79, 425-449.
[0953] Flint, D. H., and Emptage, M. H. (1988). Dihydroxy acid dehydratase from spinach contains a [2Fe-2S] cluster. J. Biol. Chem. 263, 3558-3564.
[0954] Foreman, P. K., Brown, D., Dankmeyer, L., Dean, R., Diener, S., Dunn-Coleman, N. S., Goedegebuur, F., Houfek, T. D., England, G. J., Kelley, A. S. and Meerman, H. J., 2003. Transcriptional regulation of biomass-degrading enzymes in the filamentous fungus Trichoderma reesei. Journal of Biological Chemistry, 278(34), pp. 31988-31997.
[0955] Fortin, M. G., Zelechowska, M., and Verma, D. P. S. (1985). Specific targeting of membrane nodulins to the bacteroid-enclosing compartment in soybean nodules. EMBO J. 4, 3041-3046.
[0956] Franssen, H. J., Nap, J.-P., Gloudemans, T., Stiekema, W., Dam, H. V., Govers, F., Louwerse, J., Kammen, A. V., and Bisseling, T. (1987). Characterization of cDNA for nodulin-75 of soybean: A gene product involved in early stages of root nodule development. Proc. Natl. Acad. Sci. 84, 4495-4499.
[0957] Frenzel, T., and Zenk, M. H. (1990). S-adenosyl-1-methionine: 3′-hydroxy-N-methyl-(S)-coclaurine-4′-O-methyl transferase, a regio- and stereoselective enzyme of the (S)-reticuline pathway. Phytochemistry 29, 3505-3511.
[0958] Friml, J. (2003). Auxin transport—shaping the plant. Curr. Opin. Plant Biol. 6, 7-12.
[0959] Fujioka, S. and Yokota, T. 2003. Biosynthesis and metabolism of brassinosteroids. Annu. Rev. Plant Biol. 54, 137-164.
[0960] Ge, X., Chen, J., Li, N., Lin, Y., Sun, C., and Cao, K. (2003). Resistance function of rice lipid transfer protein LTP110. J. Biochem. Mol. Biol. 36, 603-607.
[0961] Germain, V., Rylott, E. L., Larson, T. R., Sherson, S. M., Bechtold, N., Carde, J.-P., Bryce, J. H., Graham, I. A., and Smith, S. M. (2001). Requirement for 3-ketoacyl-CoA thiolase-2 in peroxisome development, fatty acid β-oxidation and breakdown of triacylglycerol in lipid bodies of Arabidopsis seedlings. Plant J. 28, 1-12.
[0962] Ghosh, H. P., and Preiss, J. (1966). Adenosine diphosphate glucose pyrophosphorylase. A regulatory enzyme in the biosynthesis of starch in spinach leaf chloroplasts. J. Biol. Chem. 241, 4491-4504.
[0963] Giaquinta, R. T. (1983). Phloem Loading of Sucrose. Annu. Rev. Plant Physiol. 34, 347-387.
[0964] Gibson, K. E., Kobayashi, H., and Walker, G. 2008. Molecular determinants of a symbiotic chronic infection. Annu. Rev. Genet. 42, 413-41.
[0965] Gilbert, H. F., Lennox, B. J., Mossman, C. D., and Carle, W. C. (1981). The relation of acyl transfer to the overall reaction of thiolase I from porcine heart. J. Biol. Chem. 256, 7371-7377.
[0966] Gilmour et al. (2000) Plant Physiol. 124: 1854-1865
[0967] Ginzberg, I., Stein, H., Kapulnik, Y., Szabados, L., Strizhov, N., Schell, J., Koncz, C., and Zilberstein, A. (1998). Isolation and characterization of two different cDNAs of A 1-pyrroline-5-carboxylate synthase in alfalfa, transcriptionally induced upon salt stress. Plant Mol. Biol. 38, 755-764.
[0968] Göbel, C., and Feussner, I. (2009). Methods for the analysis of oxylipins in plants. Phytochemistry 70, 1485-1503.
[0969] Goldgur, Y., Rom, S., Ghirlando, R., Shkolnik, D., Shadrin, N., Konrad, Z., and Bar-Zvi, D. (2007). Desiccation and Zinc Binding Induce Transition of Tomato Abscisic Acid Stress Ripening 1, a Water Stress- and Salt Stress-Regulated Plant-Specific Protein, from Unfolded to Folded State. Plant Physiol. 143, 617-628.
[0970] Gottwald, S., Samans, B., Lück, S., & Friedt, W. (2012). Jasmonate and ethylene dependent defence gene expression and suppression of fungal virulence factors: two essential mechanisms of Fusarium head blight resistance in wheat?. BMC genomics 13, 1.
[0971] Grabau, E. A. (1986). Nucleotide sequence of the cytochrome oxidase subunit I gene from soybean mitochondria. Plant Mol. Biol. 7, 377-384.
[0972] Grimaud, F., Renaut, J., Dumont, E., Sergeant, K., Lucau-Danila, A., Blervacq, A.-S., Sellier, H., Bahrman, N., Lejeune-Hénaut, I., Delbreil, B., et al. (2013). Exploring chloroplastic changes related to chilling and freezing tolerance during cold acclimation of pea (Pisum sativum L.). J. Proteomics 80, 145-159.
[0973] Guo, C., Ge, X., and Ma, H. (2013). The rice OsDIL gene plays a role in drought tolerance at vegetative and reproductive stages. Plant Mol. Biol. 82, 239-253.
[0974] Haake et al. (2002) Plant Physiol. 130: 639-648
[0975] Hai Du, Yong-Bin Wang, Yi Xie, Zhe Liang, San-Jie Jiang, Shuang-Shuang Zhang, Yu-Bi Huang, and Yi-Xiong Tang. 2013. Genome-Wide Identification and Evolutionary and Expression Analyses of MYB-Related Genes in Land Plants. DNA Research. doi: 10.1093/dnares/dst021
[0976] Hajeri, Shubash; El-Mohtar, Choaa; Dawson, William O.; & Gowda, Siddarame. (2014). Citrus tristeza virus-based RNA-interference (RNAi) vector and its potential in combating citrus Huanglongbing (HLB). Journal of Citrus Pathology, 1(1).
[0977] Haldrup, A., Simpson, D. J., and Scheller, H. V. (2000). Down-regulation of the PSI-F subunit of photosystem I (PSI) in Arabidopsis thaliana. The PSI-F subunit is essential for photoautotrophic growth and contributes to antenna function. J. Biol. Chem. 275, 31211-31218.
[0978] Halic, M., Becker, T., Pool, M. R., Spahn, C. M. T., Grassucci, R. A., Frank, J., and Beckmann, R. (2004). Structure of the signal recognition particle interacting with the elongation-arrested ribosome. Nature 427, 808-814.
[0979] Hallman, J., et al., (1997) Canadian Journal of Microbiology. 43(10): 895-914
[0980] Handa, S., Bressan, R. A., Handa, A. K., and Carpita, N. C. 1983. Solutes contributing to osmotic adjustment in cultured plant cells adapted to water stress.
[0981] Hanfrey, C., Sommer, S., Mayer, M. J., Burtin, D., and Michael, A. J. (2001). Arabidopsis polyamine biosynthesis: absence of ornithine decarboxylase and the mechanism of arginine decarboxylase activity. Plant J. 27, 551-560.
[0982] Hata, S., Kouchi, H., Suzuka, I., and Ishii, T. (1991). Isolation and characterization of cDNA clones for plant cyclins. EMBO J. 10, 2681-2688.
[0983] Hays, J. B., and Pang, Q. (1994). UV—B-Inducible and Constitutive Genes that Mediate Repair and Toleration Of UV-Damaged DNA in the Plant Arabidopsis Thaliana. In Stratospheric Ozone Depletion/UV-B Radiation in the Biosphere, R. H. Biggs, and M. E. B. Joyner, eds. (Springer Berlin Heidelberg), pp. 107-122.
[0984] He, Y. (2009). Control of the Transition to Flowering by Chromatin Modifications. Mol. Plant 2, 554-564.
[0985] Heitzeberg, F., Chen, I.-P., Hartung, F., Orel, N., Angelis, K. J., and Puchta, H. (2004). The Rad17 homologue of Arabidopsis is involved in the regulation of DNA damage repair and homologous recombination. Plant J. 38, 954-968.
[0986] Hertzberg, M., Aspeborg, H., Schrader, J., Andersson, A., Erlandsson, R., Blomqvist, K., Bhalerao, R., Uhlen, M., Teeri, T. T., Lundeberg, J., et al. (2001). A transcriptional roadmap to wood formation. Proc. Natl. Acad. Sci. 98, 14732-14737.
[0987] Hesse, H., Kreft, O., Maimann, S., Zeh, M., and Hoefgen, R. (2004). Current understanding of the regulation of methionine biosynthesis in plants. J. Exp. Bot. 55, 1799-1808.
[0988] Hirose, T., Ohdan, T., Nakamura, Y., and Terao, T. (2006). Expression profiling of genes related to starch synthesis in rice leaf sheaths during the heading period. Physiol. Plant. 128, 425-435.
[0989] Ho, C.-L., and Saito, K. (2001). Molecular biology of the plastidic phosphorylated serine biosynthetic pathway in Arabidopsis thaliana. Amino Acids 20, 243-259.
[0990] Hong, Z., Lakkineni, K., Zhang, Z., and Verma, D. P. S. (2000). Removal of Feedback Inhibition of Δ 1-Pyrroline-5-Carboxylate Synthetase Results in Increased Proline Accumulation and Protection of Plants from Osmotic Stress. Plant Physiol. 122, 1129-1136.
[0991] Hu C A, Delauney A J, Verma D P. 1992. A bifunctional enzyme (delta 1-pyrroline-5-carboxylate synthetase) catalyzes the first two steps in proline biosynthesis in plants. PNAS. 89(19):9354-58.
[0992] Hui-Wen Wang, Jin-Song Zhang, Jun-Yi Gai, Shou-Yi Chen. 2006. Cloning and comparative analysis of the gene encoding diacylglycerol acyltransferase from wild type and cultivated soybean. Theoretical and Applied Genetics. 112(6):1086-97.
[0993] Huttová, J., Mistrík, I., OIle-Simonovicova, M., and Tamás, L. (2006). Cadmium induced changes in cell wall peroxidase isozyme pattern in barley root tips. Plant Soil Environ. 52, 250.
[0994] Ishikawa, K., Nakatani, H., Katsuya, Y., and Fukazawa, C. (2007). Kinetic and Structural Analysis of Enzyme Sliding on a Substrate: Multiple Attack in β-Amylase‡. Biochemistry (Mosc.) 46, 792-798.
[0995] Ishikawa, T., Akita, S., and Li, Q. (1993). Relationship Between Content of Nonstructural Carbohydrates Before Panicle Initiation Stage and Grain-Yield in Rice (oryza-Sativa L). Jpn. J. Crop Sci. 62, 130-131.
[0996] Ito, T., Shiraishi, H., Okada, K., and Shimura, Y. (1994). Two amidophosphoribosyltransferase genes of Arabidopsis thaliana expressed in different organs. Plant Mol. Biol. 26, 529-533.
[0997] Jami, S. K., Clark, G. B., Turlapati, S. A., Handley, C., Roux, S. J., and Kirti, P. B. (2008). Ectopic expression of an annexin from Brassica juncea confers tolerance to abiotic and biotic stress treatments in transgenic tobacco. Plant Physiol. Biochem. 46, 1019-1030.
[0998] Jeng, W.-Y., Wang, N.-C., Lin, M.-H., Lin, C.-T., Liaw, Y.-C., Chang, W.-J., Liu, C.-I., Liang, P.-H., and Wang, A. H.-J. (2011). Structural and functional analysis of three β-glucosidases from bacterium Clostridium cellulovorans, fungus Trichoderma reesei and termite Neotermes koshunensis. J. Struct. Biol. 173, 46-56.
[0999] Jessica S. Kelsey, Nathan M. Fastman and Daphne D. Blumberg. 2012. Evidence of an Evolutionarily Conserved LMBR1 Domain-Containing Protein That Associates with Endocytic Cups and Plays a Role in Cell Migration in Dictyostelium discoideum. Eukaryotic Cell. 11(4):401-16.
[1000] Jimeno, S., Rondón, A. G., Luna, R., and Aguilera, A. (2002). The yeast THO complex and mRNA export factors link RNA metabolism with transcription and genome instability. EMBO J. 21, 3526-3535.
[1001] Johnston-Monje and Raizada (2011)
[1002] Juan et al. 1998 Appl Environ Microbiol 64:4600-4602 Jung Ro Lee, Kara A. Boltz, Sang Yeol Lee. 2014. Molecular chaperone function of Arabidopsis thaliana phloem protein 2-A1, encodes a protein similar to phloem lectin. Biochemical and Biophysical Research Communications. 443(1):18-21.
[1003] Kalifa, Y., Gilad, A., Konrad, Z., Zaccai, M., Scolnik, P. A., and Bar-Zvi, D. (2004). The water- and salt-stress-regulated Asr1 (abscisic acid stress ripening) gene encodes a zinc-dependent DNA-binding protein. Biochem. J. 381, 373.
[1004] Kathrin Schrick, Diana Nguyen, Wojciech M Karlowski and Klaus FX Mayer. 2004. START lipid/sterol-binding domains are amplified in plants and are predominantly associated with homeodomain transcription factors. Genome Biology. 5:R41.
[1005] Kato, Y., Konishi, M., Shigyo, M., Yoneyama, T., and Yanagisawa, S. (2010). Characterization of plant eukaryotic translation initiation factor 6 (eIF6) genes: The essential role in embryogenesis and their differential expression in Arabidopsis and rice. Biochem. Biophys. Res. Commun. 397, 673-678.
[1006] Kawashima, N., and Wildman, S. G. (1972). Studies on fraction I protein. IV. Mode of inheritance of primary structure in relation to whether chloroplast or nuclear DNA contains the code for a chloroplast protein. Biochim. Biophys. Acta 262, 42-49.
[1007] Kazama, T., Ichihashi, Y., Murata, S., and Tsukaya, H. (2010). The Mechanism of Cell Cycle Arrest Front Progression Explained by a KLUH/CYP78A5-dependent Mobile Growth Factor in Developing Leaves of Arabidopsis thaliana. Plant Cell Physiol. 51, 1046-1054.
[1008] Kereszt, A., Mergaert, P., and Kondorosi, E. (2011). Bacteroid Development in Legume Nodules: Evolution of Mutual Benefit or of Sacrificial Victims? Mol. Plant. Microbe Interact. 24, 1300-1309.
[1009] Khan, W., Balakrishnan, P., and Smith, D. L. 2008. Nod factor [Nod Bj V (C18:1, MeFuc)] and lumichrome enhance photosynthesis and growth of corn and soybean.
[1010] Khazaei, H., O'Sullivan, D. M., Sillanpää, M. J., and Stoddard, F. L. (2014). Use of synteny to identify candidate genes underlying QTL controlling stomatal traits in faba bean (Vicia faba L.). Theor. Appl. Genet. 127, 2371-2385.
[1011] Khripach, V., Zhabinskii, V., and De Groot, A. 2000. Twenty years of brassinosteroids:
[1012] steroidal plant hormones warrant better crops for the XXI century. Annals of Botany. 86, 441-447.
[1013] Kidd et al. 2007, Chemosphere 66:1458-1467
[1014] Kim, J. H., Delauney, A. J., and Verma, D. P. (1995). Control of de novo purine biosynthesis genes in ureide-producing legumes: induction of glutamine phosphoribosylpyrophosphate amidotransferase gene and characterization of its cDNA from soybean and Vigna. Plant J. Cell Mol. Biol. 7, 77-86.
[1015] Kim, S., Choi, H. I., Ryu, H. J., Park, J. H., Kim, M. D., & Kim, S. Y. (2004). ARIA, an Arabidopsis arm repeat protein interacting with a transcriptional regulator of abscisic acid-responsive gene expression, is a novel abscisic acid signaling component. Plant Physiology 136, 3639-3648.
[1016] Kim, Y.-C., Kim, S.-Y., Paek, K.-H., Choi, D., and Park, J. M. (2006). Suppression of CaCYP1, a novel cytochrome P450 gene, compromises the basal pathogen defense response of pepper plants. Biochem. Biophys. Res. Commun. 345, 638-645.
[1017] Klxmbt, H. D. (1962). Conversion in plants of benzoic acid to salicylic acid and its [beta]d-glucoside. Nature 196, 491.
[1018] Kohzuma, K., Cruz, J. A., Akashi, K., Hoshiyasu, S., Munekage, Y. N., Yokota, A., and Kramer, D. M. (2009). The long-term responses of the photosynthetic proton circuit to drought. Plant Cell Environ. 32, 209-219.
[1019] Koizumi, N. (1996). Isolation and Responses to Stress of a Gene That Encodes a Luminal Binding Protein in Arabidopsis thaliana. Plant Cell Physiol. 37, 862-865.
[1020] Kolattukudy, P. E. (1980). Biopolyester Membranes of Plants: Cutin and Suberin. Science 208, 990-1000.
[1021] Kollmar, R., and Farnham, P. J. (1993). Site-Specific Initiation of Transcription by RNA Polymerase II. Exp. Biol. Med. 203, 127-139.
[1022] Kollöffel, C., and Stroband, H. W. J. (1973). Ornithine carbamyltransferase activity from the cotyledons of developing and germinating seeds of Vicia faba. Phytochemistry 12, 2635-2638.
[1023] Kong, W., Chen, N., Liu, T., Zhu, J., Wang, J., He, X. and Jin, Y., 2015. Large-scale transcriptome analysis of cucumber and Botrytis cinerea during infection. PloS one, 10(11), p. e0142221.
[1024] Konishi, H., Yamane, H., Maeshima, M., and Komatsu, S. (2005). Characterization of fructose-bisphosphate aldolase regulated by gibberellin in roots of rice seedling. Plant Mol. Biol. 56, 839-848.
[1025] Konishi, T., Maruta, Y., Shinohara, K., and Watanabe, A. (1993). Transit Peptides of Thylakoid Luminal Proteins: the Sites of Stromal Processing are Conserved among Higher Plants. Plant Cell Physiol. 34, 1081-1087.
[1026] Kreuz, K., Dehesh, K., and Apel, K. (1986). The light-dependent accumulation of the P700 chlorophyll a protein of the photosystem I reaction center in barley. Eur. J. Biochem. 159, 459-467.
[1027] Kuc, J. (1987). Translocated Signals for Plant Immunization. Ann. N. Y. Acad. Sci. 494, 221-223.
[1028] Kukavica, B. M., Veljovice-Jovanovicć, S. D., Menckhoff, L., and Liithje, S. (2012). Cell wall-bound cationic and anionic class III isoperoxidases of pea root: biochemical characterization and function in root growth. J. Exp. Bot.
[1029] Kumar et al. 1995, Environ. Sci. Technol. 29:1232-1238
[1030] Kuras, R., Büschlen, S., and Wollman, F.-A. (1995). Maturation of Pre-apocytochrome fin Vivo: a site-directed mutagenesis study in Chlamydomonas reinhardtii. J. Biol. Chem. 270, 27797-27803.
[1031] Kusuda, H., Koga, W., Kusano, M., Oikawa, A., Saito, K., Hirai, M. Y., and Yoshida, K. T.
[1032] (2015). Ectopic expression of myo-inositol 3-phosphate synthase induces a wide range of metabolic changes and confers salt tolerance in rice. Plant Sci. 232, 49-56.
[1033] Kyoichi Isono, Hiroshi Yamamoto, Kimiyuki Satoh and Hirokazu Kobayashi. 1999. An Arabidopsis cDNA encoding a DNA-binding protein that is highly similar to the DEAH family of RNA/DNA helicase genes. Nucleic Acids Research. 27(18):3728-35.
[1034] Lange, B. M., and Croteau, R. (1999). Isoprenoid Biosynthesis via a Mevalonate-Independent Pathway in Plants: Cloning and Heterologous Expression of 1-Deoxy-d-xylulose-5-phosphate Reductoisomerase from Peppermint. Arch. Biochem. Biophys. 365, 170-174.
[1035] Lara, M., Cullimore, J. V., Lea, P. J., Miflin, B. J., Johnston, A. W. B., and Lamb, J. W. (1983). Appearance of a novel form of plant glutamine synthetase during nodule development in Phaseolus vulgaris L. Planta 157, 254-258.
[1036] Laux, T., Seurinck, J., and Goldberg, R. B. (1991). A soybean embryo cDNA encodes a DNA binding protein with histone and HMG-protein-like domains. Nucleic Acids Res. 19, 4768.
[1037] Lee, H. I., León, J., and Raskin, I. (1995). Biosynthesis and metabolism of salicylic acid. Proc. Natl. Acad. Sci. 92, 4076-4079.
[1038] Lee, S.-B., Jung, S.-J., Go, Y.-S., Kim, H.-U., Kim, J.-K., Cho, H.-J., Park, O. K., and Suh, M.-C. (2009). Two Arabidopsis 3-ketoacyl CoA synthase genes, KCS20 and KCS2/DAISY, are functionally redundant in cuticular wax and root suberin biosynthesis, but differentially controlled by osmotic stress. Plant J. 60, 462-475.
[1039] Legocki, R. P., and Verma, D. P. S. (1980). Identification of “nodule-specific” host proteins (nodulins) involved in the development of Rhizobium-Legume symbiosis. Cell 20, 153-163.
[1040] Levey, T., Westhoff, P., and Meierhoff, K. (2014). Expression of a nuclear-encoded psbH gene complements the plastidic RNA processing defect in the PSII mutant hcf107 in Arabidopsis thaliana. Plant J. 80, 292-304.
[1041] Li et al., (2004) Mycologia 96: 526-536
[1042] Li, C., Ng, C. K.-Y., and Fan, L.-M. (2015). MYB transcription factors, active players in abiotic stress signaling. Environ. Exp. Bot. 114, 80-91.
[1043] Li, H. M., Sullivan, R., Moy, M., Kobayashi, D. Y. and Belanger, F. C., 2004. Expression of a novel chitinase by the fungal endophyte in Poa ampla. Mycologia, 96(3), pp. 526-536.
[1044] Liepman, A. H., and Olsen, L. J. (2003). Alanine Aminotransferase Homologs Catalyze the Glutamate: Glyoxylate Aminotransferase Reaction in Peroxisomes of Arabidopsis. Plant Physiol. 131, 215-227.
[1045] Lin, H., Yang, Y., Quan, R., Mendoza, I., Wu, Y., Du, W., Zhao, S., Schumaker, K. S., Pardo, J. M., and Guo, Y. (2009). Phosphorylation of SOS3-LIKE CALCIUM BINDING PROTEIN8 by SOS2 Protein Kinase Stabilizes Their Protein Complex and Regulates Salt Tolerance in Arabidopsis. Plant Cell 21, 1607-1619.
[1046] Lindquist, E., and Aronsson, H. (2014). Proteins affecting thylakoid morphology—the key to understanding vesicle transport in chloroplasts? Plant Signal. Behay. 9, e977205.
[1047] Lindstrom, J. T., Sun, S. and Belanger, F. C., 1993. A novel fungal protease expressed in endophytic infection of Poa species. Plant physiology, 102(2), pp. 645-650.
[1048] Liu, Z., Hossain, G. S., Islas-Osuna, M. A., Mitchell, D. L., and Mount, D. W. (2000). Repair of UV damage in plants by nucleotide excision repair: Arabidopsis UVH1 DNA repair gene is a homolog of Saccharomyces cerevisiae Radl. Plant J. 21, 519-528.
[1049] Lo Presti, L., Lanver, D., Schweizer, G., Tanaka, S., Liang, L., Tollot, M., Zuccaro, A., Reissmann, S. and Kahmann, R., 2015. Fungal effectors and plant susceptibility. Annual review of plant biology, 66, pp. 513-545.
[1050] Madsen, N. B (1986). The Enzymes (Academic Press, Inc., New York.).
[1051] Mahato, S., De, D., Dutta, D., Kundu, M., Bhattacharya, S., Schiavone, M. T., and Bhattacharya, S. K. (2004). Potential use of sugar binding proteins in reactors for regeneration of CO2 fixation acceptor D-Ribulose-1,5-bisphosphate. Microb. Cell Factories 3, 7.
[1052] Marc Libault, Gary Stacey. 2010. Evolution of FW2.2-like (FWL) and PLAC8 genes in eukaryotes. Plant Signaling & Behavior. 5(10):1226-28.
[1053] Matamoros, M. A., Dalton, D. A., Ramos, J., Clemente, M. R., Rubio, M. C., and Becana, M. (2003). Biochemistry and Molecular Biology of Antioxidants in the Rhizobia-Legume Symbiosis. Plant Physiol. 133, 499-509.
[1054] Mateos et al. 1992, Appl Environ Microbiol 58:1816-1822
[1055] Matiru, V. N. and Dakora, F. D. 2005. Xylem transport and shoot accumulation of lumichrome, a newly recongnized rhizobial signal, alters root respiration, stomatal conductance, leaf transpiration and photosynthetic rates in legumes and cereals. New Phytologist. 165, 847-855.
[1056] Mattiacci, L., Dicke, M., and Posthumus, M. A. (1995). beta-Glucosidase: an elicitor of herbivore-induced plant odor that attracts host-searching parasitic wasps. Proc. Natl. Acad. Sci. U.S.A 92, 2036-2040.
[1057] Mayer K, Schüller C, Wambutt R, Murphy G, Volckaert G, McCombie W R. 1999.
[1058] Sequence and analysis of chromosome 4 of the plant Arabidopsis thaliana. Nature. 402:769-77.
[1059] McAinsh, M. R. (1990). Abscisic acid-induced elevation of guard cell cytosolic Ca2+ precedes stomatal closure. Nature 343, 186-188.
[1060] McCarty, R. E. (1992). A plant biochemist's view of H+ ATPases and ATP synthases. J. Exp. Biol. 172, 431-441.
[1061] McClung, C. R., Hsu, M., Painter, J. E., Gagne, J. M., Karlsberg, S. D., and Salome, P. A. (2000). Integrated Temporal Regulation of the Photorespiratory Pathway. Circadian Regulation of Two Arabidopsis Genes Encoding Serine Hydroxymethyltransferase. Plant Physiol. 123, 381-392.
[1062] McClure, P. R. and Israel, D. W. 1979. Transport of nitrogen in the xylem of soybean plants. Plant Physiol. 64, 411-416.
[1063] McCormack, E., Tsai, Y.-C., and Braam, J. (2005). Handling calcium signaling: Arabidopsis CaMs and CMLs. Trends Plant Sci. 10, 383-389.
[1064] McDonald, D., Price, M. N., Goodrich, J., Nawrocki, E. P., DeSantis, T. Z., Probst, A., . . . Hugenholtz, P. (2012). An improved Greengenes taxonomy with explicit ranks for ecological and evolutionary analyses of bacteria and archaea. The ISME Journal, 6(3), 610-8.
[1065] Mechthild Tegeder. 2012. Transporters for amino acids in plant cells: some functions and many unknowns. Current Opinion in Plant Biology. 15(3):315-21.
[1066] Medina and Baresi 2007, J Microbiol Methods 69:391-393
[1067] Mei Guo, Mary A. Rupe, Jo Ann Dieter, Jijun Zou, Daniel Spielbauer, Keith E. Duncan,
[1068] Richard J. Howard, Zhenglin Hou and Carl R. Simmons. 2010. Cell Number Regulator1 Affects Plant and Organ Size in Maize: Implications for Crop Yield Enhancement and Heterosis. The Plant Cell. 22(4):1057-73.
[1069] Meng Zhang, Jilian Fan, David C. Taylor and John B. Ohlrogge. 2009. DGAT1 and PDAT1 Acyltransferases Have Overlapping Functions in Arabidopsis Triacylglycerol Biosynthesis and Are Essential for Normal Pollen and Seed Development. The Plant Cell. 21(12):3885-3901
[1070] Menotta, M., Amicucci, A., Basili, G., Polidori, E., Stocchi, V. and Rivero, F., 2008. Molecular and functional characterization of a Rho GDP dissociation inhibitor in the filamentous fungus Tuber borchii. BMC microbiology, 8(1), p. 57.
[1071] Michal Malewicz, Thomas Perlmann. 2014. Function of transcription factors at DNA lesions in DNA repair. Experimental Cell Research. 329(1):94-100.
[1072] Michel, H., Behr, J., Harrenga, A., and Kannt, A. (1998). CYTOCHROME C OXIDASE: Structure and Spectroscopy. Annu. Rev. Biophys. Biomol. Struct. 27, 329-356.
[1073] Ming-Der Shih, Folkert A. Hoekstra, Yue-Ie C. Hsing. 2008. Late Embryogenesis Abundant Proteins. Advances in Botanical Research. 48:211-55.
[1074] Miyagawa, Y., Tamoi, M., and Shigeoka, S. (2001). Overexpression of a cyanobacterial fructose-1,6-/sedoheptulose-1,7-bisphosphatase in tobacco enhances photosynthesis and growth. Nat. Biotechnol. 19, 965-969.
[1075] Monde, R. A., Schuster, G., and Stern, D. B. (2000). Processing and degradation of chloroplast mRNA. Biochimie 82, 573-582.
[1076] Moreno, J. I., Martin, R., and Castresana, C. (2005). Arabidopsis SHMT1, a serine hydroxymethyltransferase that functions in the photorespiratory pathway influences resistance to biotic and abiotic stress. Plant J. 41, 451-463.
[1077] Mori, M., Murata, K., Kubota, H., Yamamoto, A., Matsushiro, A., and Monta, T. (1992). Cloning of a cDNA encoding the Tcp-1 (t complex polypeptide 1) homologue of Arabidopsis thaliana. Gene 122, 381-382.
[1078] Mortvedt 1996, Fertilizer Res. 43:55-61
[1079] Moura, J. C. M. S., Bonine, C. A. V., Viana, J. O. F., Dornelas, M. C., and Mazzafera, P. 2010. Abiotic and biotic stresses and changes in the lignin content and composition in plants. J. Int. Plant Biol. 53, (4) 360-376.
[1080] Müller A. H., and Hansson, M. (2009). The Barley Magnesium Chelatase 150-kD Subunit Is Not an Abscisic Acid Receptor. Plant Physiol. 150, 157-166.
[1081] Mustafiz, A., Singh, A. K., Pareek, A., Sopory, S. K., and Singla-Pareek, S. L. (2011). Genome-wide analysis of rice and Arabidopsis identifies two glyoxalase genes that are highly expressed in abiotic stresses. Funct. Integr. Genomics 11, 293-305.
[1082] Navarova, H., Bernsdorff, F., Doring, A., and Zeier, J. 2012. Pipecolic acid, an endogenous mediator of defense amplification and priming, is a critical regulator of inducible plant immunity. The Plant Cell. 24, 5123-5141.
[1083] Neha Vaid, Prashant Kumar Pandey, Narendra Tutej a. 2012. Genome-wide analysis of lectin receptor-like kinase family from Arabidopsis and rice. Plant Molec Biol. 80(4):365-88.
[1084] Nelson, D., and Werck-Reichhart, D. (2011). A P450-centric view of plant evolution. Plant J. 66, 194-211.
[1085] Newton, K. J. (1988). Plant Mitochondrial Genomes: Organization, Expression and Variation. Annu. Rev. Plant Physiol. Plant Mol. Biol. 39, 503-532.
[1086] Nishizawa, A. N., and Buchanan, B. B. (1981). Enzyme regulation in C4 photosynthesis. Purification and properties of thioredoxin-linked fructose bisphosphatase and sedoheptulose bisphosphatase from corn leaves. J. Biol. Chem. 256, 6119-6126.
[1087] Nordberg, J., and Arnér, E. S. J. (2001). Reactive oxygen species, antioxidants, and the mammalian thioredoxin systeml. Free Radic. Biol. Med. 31, 1287-1312.
[1088] Ooka, H., Satoh, K., Doi, K., Nagata, T., Otomo, Y., Murakami, K., Matsubara, K., Osato, N., Kawai, J., Carninci, P., et al. (2003). Comprehensive analysis of NAC family genes in Oryza sativa and Arabidopsis thaliana. DNA Res. Int. J. Rapid Publ. Rep. Genes Genomes 10, 239-247.
[1089] Oppenheimer, D. G., Haas, N., Silflow, C. D., and Snustad, D. P. (1988). The β-tubulin gene family of Arabidopsis thaliana: preferential accumulation of the β1 transcript in roots. Gene 63, 87-102.
[1090] Osman, S. F. and Fett, W. F. 1982. Isoflavone glucoside stress metabolites of soybean leaves. Phytochem. 22, 1921-1923.
[1091] Pang, Q., Hays, J. B., Rajagopal, I., and Schaefer, T. S. (1993). Selection of Arabidopsis cDNAs that partially correct phenotypes of Escherichia coli DNA-damage-sensitive mutants and analysis of two plant cDNAs that appear to express UV-specific dark repari activities. Plant Mol. Biol. 22, 411-426.
[1092] Pearson, Methods Enzymol. 183:63-98 (1990).
[1093] Peiro, A., Izquierdo-Garcia, A. C., Sanchez-Navarro, J. A., Pallas, V., Mulet, J. M., and Aparicio, F. (2014). Patellins 3 and 6, two members of the Plant Patellin family, interact with the movement protein of Alfalfa mosaic virus and interfere with viral movement. Mol. Plant Pathol. 15, 881-891.
[1094] Peng Wang, Zhaowei Li, Jingshuang Wei, Zenglin Zhao, Daye Sun, and Sujuan Cui. 2012. A Na+/Ca2+ Exchanger-like Protein (AtNCL) Involved in Salt Stress in Arabidopsis. J Biol Chem. 287(53): 44062-44070.
[1095] Pérez-Miranda S., Journal of Microbiological Methods, Volume 70, Issue 1, Pages 127-131 (2007)
[1096] Peyret, P., Perez, P., and Alric, M. (1995). Structure, Genomic Organization, and Expression of the Arabidopsis thaliana Aconitase Gene PLANT ACONITASE SHOW SIGNIFICANT HOMOLOGY WITH MAMMALIAN IRON-RESPONSIVE ELEMENT-BINDING PROTEIN. J. Biol. Chem. 270, 8131-8137.
[1097] Phalip et al., (1994) J Basic Microbiol 34: 277-280
[1098] Phillips, D. A., Joseph, C. M., Yang, G., Martinez-Romero, E., Sanborn, J. R., and Volpin, H. 1999. Identification of lumichrome as a Sinorhizobium enhancer of alfalfa root respiration and shoot growth. PNAS. 96, (22) 12275-12280.
[1099] Pii, Y., Molesini, B., Masiero, S., and Pandolfini, T. (2012). The non-specific lipid transfer protein N5 of Medicago truncatula is implicated in epidermal stages of rhizobium-host interaction. BMC Plant Biol. 12, 233.
[1100] Polacco, J. C., and Holland, M. A. (1993). Roles of Urease in Plant Cells. In International Review of Cytology, K. W. J. and J. Jarvik, ed. (Academic Press), pp. 65-103.
[1101] Pollard, M., Beisson, F., Li, Y., and Ohlrogge, J. B. (2008). Building lipid barriers: biosynthesis of cutin and suberin. Trends Plant Sci. 13, 236-246.
[1102] Ponting, C. P. (1997). Evidence for PDZ domains in bacteria, yeast, and plants. Protein Sci. 6, 464-468.
[1103] Prabhu, V., Chatson, K. B., Lui, H., Abrams, G. D., and King, J. (1998). Effects of Sulfanilamide and Methotrexate on 13C Fluxes through the Glycine Decarboxylase/Serine Hydroxymethyltransferase Enzyme System in Arabidopsis. Plant Physiol. 116, 137-144.
[1104] Priya, R., and Siva, R. (2015). Analysis of phylogenetic and functional diverge in plant nine-cis epoxycarotenoid dioxygenase gene family. J. Plant Res. 1-16.
[1105] Qian, W., Yu, C., Qin, H., Liu, X., Zhang, A., Johansen, I. E., and Wang, D. (2007). Molecular and functional analysis of phosphomannomutase (PMM) from higher plants and genetic evidence for the involvement of PMM in ascorbic acid biosynthesis in Arabidopsis and Nicotiana benthamiana: Functional analysis of plant phosphomannomutase. Plant J. 49, 399-413.
[1106] Quadt-Hallmann et al., (1997) Can. J. Microbiol., 43: 577-582
[1107] Quast, C., Pruesse, E., Yilmaz, P., Gerken, J., Schweer, T., Glo, F. O., & Yarza, P. (2013). The SILVA ribosomal RNA gene database project: improved data processing and web-based tools. Nucleic Acids Research, 41(November 2012), 590-596.
[1108] Quiroga, M., de Forchetti, S. M., Taleisnik, E., and Tigier, H. A. (2001). Tomato root peroxidase isoenzymes: kinetic studies of the coniferyl alcohol peroxidase activity, immunological properties and role in response to salt stress. J. Plant Physiol. 158, 1007-1013.
[1109] Raimund Tenhaken, Tobias Doerks, and Peer Bork. 2005. DCD—a novel plant specific domain in proteins involved in development and programmed cell death. BMC Bioinformatics. 6:169.
[1110] Rajkumar et al. 2009, Chemosphere 77:153-160
[1111] Ramos, J., Matamoros, M. A., Naya, L., James, E. K., Rouhier, N., Sato, S., Tabata, S., and
[1112] Becana, M. (2009). The glutathione peroxidase gene family of Lotus japonicus: characterization of genomic clones, expression analyses and immunolocalization in legumes. New Phytol. 181, 103-114.
[1113] Rashid, N., Morikawa, M., and Imanaka, T. (1997). Gene cloning and characterization of recombinant ribose phosphate pyrophosphokinase from a hyperthermophilic archaeon. J. Ferment. Bioeng. 83, 412-418.
[1114] Reddy, P. V., Lam, C. K. and Belanger, F. C., 1996. Mutualistic fungal endophytes express a proteinase that is homologous to proteases suspected to be important in fungal pathogenicity. Plant Physiology, 111(4), pp. 1209-1218.
[1115] Regalado, A., Pierri, C. L., Bitetto, M., Laera, V. L., Pimentel, C., Francisco, R., Passarinho, J., Chaves, M. M., and Agrimi, G. (2012). Characterization of mitochondrial dicarboxylate/tricarboxylate transporters from grape berries. Planta 237, 693-703.
[1116] Reinbothe, H. and Mothes, K. 1962. Urea, ureides and guanidine in plants. Annu. Rev. Plant Physiol. 13, 129-149.
[1117] Reinhold-Hurek, B., and Hurek, T. (2011). Living inside plants: bacterial endophytes. Curr. Opin. Plant Biol. 14, 435-443.
[1118] Rexroth, S., Poetsch, A., Rogner, M., Hamann, A., Werner, A., Osiewacz, H. D., Schafer, E. R., Seelert, H. and Dencher, N. A., 2012. Reactive oxygen species target specific tryptophan site in the mitochondrial ATP synthase. Biochimica et Biophysica Acta (BBA)-Bioenergetics, 1817(2), pp. 381-387.
[1119] Ribichich, K. F., Tioni, M. F., Chan, R. L., and Gonzalez, D. H. (2001). Cell-Type-Specific Expression of Plant Cytochrome cmRNA in Developing Flowers and Roots. Plant Physiol. 125, 1603-1610.
[1120] Roberto Schmidt, Harald Stransky, Wolfgang Koch. 2007. The amino acid permease AAP8 is important for early seed development in Arabidopsis thaliana. Planta. 226(4):805-13.
[1121] Robinson, D. L., Kahn, M. L., and Vance, C. P. (1994). Cellular localization of nodule-enhanced aspartate aminotransferase in Medicago sativa L. Planta 192, 202-210.
[1122] Rocha, A. G., Mehlmer, N., Stael, S., Mair, A., Parvin, N., Chigri, F., Teige, M., and Vothknecht, U. C. (2014). Phosphorylation of Arabidopsis transketolase at Ser 428 provides a potential paradigm for the metabolic control of chloroplast carbon metabolism. Biochem. J. 458, 313-322.
[1123] Rodrigues, S. M., Andrade, M. O., Gomes, A. P. S., DaMatta, F. M., Baracat-Pereira, M. C., and Fontes, E. P. B. (2006). Arabidopsis and tobacco plants ectopically expressing the soybean antiquitin-like ALDH7 gene display enhanced tolerance to drought, salinity, and oxidative stress. J. Exp. Bot. 57, 1909-1918.
[1124] Roessner et al., (2001) Plant Cell, 13, 11-29
[1125] Rondón, A. G., Jimeno, S., Garcia-Rubio, M., and Aguilera, A. (2003). Molecular Evidence That the Eukaryotic THO/TREX Complex Is Required for Efficient Transcription Elongation. J. Biol. Chem. 278, 39037-39043.
[1126] Rongvaux, A., Andris, F., Van Gool, F., and Leo, 0. (2003). Reconstructing eukaryotic NAD metabolism. BioEssays News Rev. Mol. Cell. Dev. Biol. 25, 683-690.
[1127] Roppolo, D., Boeckmann, B., Pfister, A., Boutet, E., Rubio, M. C., Denervaud-Tendon, V., Vermeer, J. E. M., Gheyselinck, J., Xenarios, I., and Geldner, N. (2014). Functional and Evolutionary Analysis of the CASPARIAN STRIP MEMBRANE DOMAIN PROTEIN Family. Plant Physiol. 165, 1709-1722.
[1128] Ruiter, H. de, and Kollöffel, C. (1982). Activity of Enzymes of Arginine Metabolism in the Cotyledons of Developing and Germinating Pea Seeds. Plant Physiol. 70, 313-315.
[1129] S E Jacobsen, K A Binkowski, and N E Olszewski. 1996. SPINDLY, a tetratricopeptide repeat protein involved in gibberellin signal transduction in Arabidopsis. PNAS. 93(17):9292-9296.
[1130] Sainz, G., Carrell, C. J., Ponamarev, M. V., Soriano, G. M., Cramer, W. A., and Smith, J. L. (2000). Interruption of the Internal Water Chain of Cytochrome f Impairs Photosynthetic Function†,‡. Biochemistry (Mosc.) 39, 9164-9173.
[1131] Samuel, M. A., Salt, J. N., Shiu, S. H., & Goring, D. R. (2006). Multifunctional arm repeat domains in plants. International review of cytology 253, 1-26.
[1132] Sauer, N., and Tanner, W. (1993). Molecular-Biology of Sugar Transporters in Plants. Bot. Acta 106, 277-286.
[1133] Sauveplane, V., Kandel, S., Kastner, P.-E., Ehlting, J., Compagnon, V., Werck-Reichhart, D., and Pinot, F. (2009). Arabidopsis thaliana CYP77A4 is the first cytochrome P450 able to catalyze the epoxidation of free fatty acids in plants. FEBS J. 276, 719-735.
[1134] Schaller, A. (2004). A cut above the rest: the regulatory function of plant proteases—Springer. Planta 220, 183-197.
[1135] Scheible, W.-R., Krapp, A., and Stitt, M. (2000). Reciprocal diurnal changes of phosphoenolpyruvate carboxylase expression and cytosolic pyruvate kinase, citrate synthase and NADP-isocitrate dehydrogenase expression regulate organic acid metabolism during nitrate assimilation in tobacco leaves. Plant Cell Environ. 23, 1155-1167.
[1136] Schomburg, P. D. D., and Stephan, D. D. (1995). (S)-2-Hydroxy-acid oxidase. In Enzyme Handbook 10, P. D. D. Schomburg, and D. D. Stephan, eds. (Springer Berlin Heidelberg), pp. 413-422.
[1137] Schomburg, P. D. D., and Stephan, D. D. (1997). Ribose-phosphate pyrophosphokinase. In Enzyme Handbook, P. D. D. Schomburg, and D. D. Stephan, eds. (Springer Berlin Heidelberg), pp. 421-427.
[1138] Schopfer, C. R., and Ebel, J. (1998). Identification of elicitor-induced cytochrome P450s of soybean (Glycine max L.) using differential display of mRNA. Mol. Gen. Genet. MGG 258, 315-322.
[1139] Schöttler, M. A., Fliigel, C., Thiele, W., and Bock, R. (2007a). Knock-out of the Plastid-encoded PetL Subunit Results in Reduced Stability and Accelerated Leaf Age-dependent Loss of the Cytochrome b6f Complex. J. Biol. Chem. 282, 976-985.
[1140] Schöttler, M. A., Flügel, C., Thiele, W., Stegemann, S., and Bock, R. (2007). The plastome-encoded PsaJ subunit is required for efficient Photosystem I excitation, but not for plastocyanin oxidation in tobacco. Biochem. J. 403, 251.
[1141] Schuhmann, H., and Adamska, I. (2012). Deg proteases and their role in protein quality control and processing in different subcellular compartments of the plant cell. Physiol. Plant. 145, 224-234.
[1142] Schultz, C. J., Hsu, M., Miesak, B., and Coruzzi, G. M. (1998). Arabidopsis Mutants Define an in Vivo Role for Isoenzymes of Aspartate Aminotransferase in Plant Nitrogen Assimilation. Genetics 149, 491-499.
[1143] Schultze, M., and Kondorosi, A. (1998). Regulation of Symbiotic Root Nodule Development. Annu. Rev. Genet. 32, 33-57.
[1144] Scott, D. B., Farnden, K. J. F., and Robertson, J. G. (1976). Ammonia assimilation in lupin nodules. Nature 263, 703-705.
[1145] Scranton, M. A., Fowler, J. H., Girke, T., and Walling, L. L. (2013). Microarray Analysis of Tomato's Early and Late Wound Response Reveals New Regulatory Targets for Leucine Aminopeptidase A. PLoS ONE 8, e77889.
[1146] Seki, M., Narusaka, M., Ishida, J., Nanjo, T., Fujita, M., Oono, Y., Kamiya, A., Nakajima, M., Enju, A., Sakurai, T., et al. (2002). Monitoring the expression profiles of 7000 Arabidopsis genes under drought, cold and high-salinity stresses using a full-length cDNA microarray. Plant J. 31, 279-292.
[1147] Sekine, K., Fujiwara, M., Nakayama, M., Takao, T., Hase, T., and Sato, N. (2007). DNA binding and partial nucleoid localization of the chloroplast stromal enzyme ferredoxin:sulfite reductase. FEBS J. 274, 2054-2069.
[1148] Sengupta-Gopalan, C., and Pitas, J. W. (1986). Expression of nodule-specific glutamine synthetase genes during nodule development in soybeans. Plant Mol. Biol. 7, 189-199.
[1149] Serraj, R., Sinclair, T. R., and Purcell, L. C. 1999. Symbiotic N2 fixation response to drought. J. Exp. Bot. 50, 143-155.
[1150] Shah, J. (2005). Lipids, Lipases, and Lipid-Modifying Enzymes in Plant Disease Resistance. Annu. Rev. Phytopathol. 43, 229-260.
[1151] Shah, J., and Klessig, D. (1999). Chapter 23 Salicylic acid: signal perception and transduction. In New Comprehensive Biochemistry, M. A. H. and K. R. L. P. J. J. Hooykaas, ed. (Elsevier), pp. 513-541.
[1152] Shen, Y.-Y., Wang, X.-F., Wu, F.-Q., Du, S.-Y., Cao, Z., Shang, Y., Wang, X.-L., Peng, C.-C., Yu, X.-C., Zhu, S.-Y., et al. (2006). The Mg-chelatase H subunit is an abscisic acid receptor. Nature 443, 823-826.
[1153] Shibuya, M., Hoshino, M., Katsube, Y., Hayashi, H., Kushiro, T., and Ebizuka, Y. (2006). Identification of β-amyrin and sophoradiol 24-hydroxylase by expressed sequence tag mining and functional expression assay. FEBS J. 273, 948-959.
[1154] Shinozaki, K., and Yamaguchi-Shinozaki, K. (2000). Molecular responses to dehydration and low temperature: differences and cross-talk between two stress signaling pathways. Curr. Opin. Plant Biol. 3, 217-223.
[1155] Siebertz, B., Logemann, J., Willmitzer, L., and Schell, J. (1989). cis-analysis of the wound-inducible promoter wunl in transgenic tobacco plants and histochemical localization of its expression. Plant Cell 1, 961-968.
[1156] Simm S, Papasotiriou DG, Ibrahim M, Leisegang M S, Muller B, Schorge T, Karas M, Minis O, Sommer M S, and Schleiff E. 2013. Defining the core proteome of the chloroplast envelope membranes. Frontiers in Plant Science. 4:176-193.
[1157] Sinclair, T. R. and Serraj, R. 1995. Legume nitrogen fixation and drought. Nature. 378. 344.
[1158] Smalle, J., Kurepa, J., Yang, P., Babiychuk, E., Kushnir, S., Durski, A., and Vierstra, R. D. (2002). Cytokinin Growth Responses in Arabidopsis Involve the 26S Proteasome Subunit RPN12. Plant Cell 14, 17-32.
[1159] Smart, C. J., Monéger, F., and Leaver, C. J. (1994). Cell-specific regulation of gene expression in mitochondria during anther development in sunflower. Plant Cell 6, 811-825.
[1160] Smibert and Krieg 1994, In: Gerhardt P, Murray R, Wood W, Krieg N (Eds) Methods for General and Molecular Bacteriology, ASM Press, Washington, D.C., pp 615-640
[1161] Soares et al. (1999). Revista de Microbiolgia 30(4): 299-303
[1162] Soriani, F. M., Kress, M. R., de Gouvea, P. F., Malavazi, I., Savoldi, M., Gallmetzer, A., Strauss, J., Goldman, M. H. S. and Goldman, G. H., 2009. Functional characterization of the Aspergillus nidulans methionine sulfoxide reductases (msrA and msrB). Fungal Genetics and Biology, 46(5), pp. 410-417.
[1163] Spiekermann et al. 1999, Arch Microbiol 171:73-80
[1164] Staswick, P. (1997). The occurrence and gene expression of vegetative storage proteins and a Rubisco Complex Protein in several perennial soybean species. J. Exp. Bot. 48, 2031-2036.
[1165] Staswick, P. E., Crafts-Brandner, S. J., and Salvucci, M. E. (1994). cDNA Sequence for the Ribulose 1,5 Bisphosphate Carboxylase/Oxygenase Complex Protein (A Protein that Accumulates in Soybean Leaves in Response to Fruit Removal). Plant Physiol. 105, 1445-1446.
[1166] Strepp, R., Scholz, S., Kruse, S., Speth, V., and Reski, R. (1998). Plant nuclear gene knockout reveals a role in plastid division for the homolog of the bacterial cell division protein FtsZ, an ancestral tubulin. Proc. Natl. Acad. Sci. 95, 4368-4373.
[1167] Strong, F. E., and Kruitwagen, E. (1967). Traumatic Acid: an Accelerator of Abscission in Cotton Explants. Nature 215, 1380-1381.
[1168] Su, L.-W., Chang, S. H., Li, M.-Y., Huang, H.-Y., Jane, W.-N., and Yang, J.-Y. (2013). Purification and biochemical characterization of Arabidopsis At-NEET, an ancient iron-sulfur protein, reveals a conserved cleavage motif for subcellular localization. Plant Sci. 213, 46-54.
[1169] Suárez, M. B., Sanz, L., Chamorro, M. I., Rey, M., González, F. J., Llobell, A. and Monte, E., 2005. Proteomic analysis of secreted proteins from Trichoderma harzianum: identification of a fungal cell wall-induced aspartic protease. Fungal Genetics and Biology, 42(11), pp. 924-934.
[1170] Sun, X.-L., Yu, Q.-Y., Tang, L.-L., Ji, W., Bai, X., Cai, H., Liu, X.-F., Ding, X.-D., and Zhu, Y.-M. (2013). GsSRK, a G-type lectin S-receptor-like serine/threonine protein kinase, is a positive regulator of plant tolerance to salt stress. J. Plant Physiol. 170, 505-515.
[1171] Sun, Y., Yi, X., Peng, M., Zeng, H., Wang, D., Li, B., Tong, Z., Chang, L., Jin, X., and Wang, X. (2014). Proteomics of Fusarium oxysporum Race 1 and Race 4 Reveals Enzymes Involved in Carbohydrate Metabolism and Ion Transport That Might Play Important Roles in Banana Fusarium Wilt. PLoS ONE 9, e113818.
[1172] Suorsa, M., Regel, R. E., Paakkarinen, V., Battchikova, N., Herrmann, R. G., and Aro, E.-M. (2004). Protein assembly of photosystem II and accumulation of subcomplexes in the absence of low molecular mass subunits PsbL and PsbJ. Eur. J. Biochem. 271, 96-107.
[1173] Sushil Tripathi, Karen R. Christie, Rama Balakrishnan, Rachael Huntley, David P. Hill, Liv Thommesen, Judith A. Blake, Martin Kuiper and Astrid Lxgreid. 2013. Gene Ontology annotation of sequence-specific DNA binding transcription factors: setting the stage for a large-scale curation effort. Database. 2013:bat062.
[1174] Suto et al., (2002) J Biosci Bioeng. 93:88-90
[1175] Suzuki, H., Takahashi, S., Watanabe, R., Fukushima, Y., Fujita, N., Noguchi, A., Yokoyama, R., Nishitani, K., Nishino, T., and Nakayama, T. (2006). An isoflavone conjugate-hydrolyzing beta-glucosidase from the roots of soybean (Glycine max) seedlings: purification, gene cloning, phylogenetics, and cellular localization. J. Biol. Chem. 281, 30251-30259.
[1176] Swiatek, M., Kuras, R., Sokolenko, A., Higgs, D., Olive, J., Cinque, G., Müller, B., Eichacker, L. A., Stern, D. B., Bassi, R., et al. (2001). The Chloroplast Gene ycf9 Encodes a Photosystem II (PSII) Core Subunit, PsbZ, That Participates in PSII Supramolecular Architecture. Plant Cell 13, 1347-1368.
[1177] T. Clint Nesbitt, Steven D. Tanksley. fw2.2 Directly Affects the Size of Developing Tomato Fruit, with Secondary Effects on Fruit Number and Photosynthate Distribution. Plant Physiol. 127(2):575-83.
[1178] Takahashi, A., Casais, C., Ichimura, K., and Shirasu, K. (2003). HSP90 interacts with RAR1 and SGT1 and is essential for RPS2-mediated disease resistance in Arabidopsis. Proc. Natl. Acad. Sci. 100, 11777-11782.
[1179] Takahashi, T., Gasch, A., Nishizawa, N., and Chua, N. H. (1995). The DIMINUTO gene of Arabidopsis is involved in regulating cell elongation. Genes Dev. 9, 97-107.
[1180] Takeuchi, Y., Yoshikawa, M., Takeba, G., Tanaka, K., Shibata, D., and Horino, 0. (1990). Molecular Cloning and Ethylene Induction of mRNA Encoding a Phytoalexin Elicitor-Releasing Factor, beta-1,3-Endoglucanase, in Soybean. Plant Physiol. 93, 673-682.
[1181] Tamir, S., Paddock, M. L., Darash-Yahana-Baram, M., Holt, S. H., Sohn, Y. S., Agranat, L., Michaeli, D., Stofleth, J. T., Lipper, C. H., Morcos, F., et al. (2015). Structure-function analysis of NEET proteins uncovers their role as key regulators of iron and ROS homeostasis in health and disease. Biochim. Biophys. Acta BBA—Mol. Cell Res. 1853, 1294-1315.
[1182] Terol, J., Soler, G., Talon, M., and Cercos, M. (2010). The aconitate hydratase family from Citrus. BMC Plant Biol. 10, 222.
[1183] Thomashow (2001) Plant Physiol. 125: 89-93
[1184] Torabi, S., Umate, P., Manayski, N., Plochinger, M., Kleinknecht, L., Bogireddi, H., Herrmann, R. G., Wanner, G., Schroder, W. P., and Meurer, J. (2014). PsbN Is Required for Assembly of the Photosystem II Reaction Center in Nicotiana tabacum. Plant Cell 26, 1183-1199.
[1185] UniProt Consortium (2015a). Glucan endo-1,3-beta-glucosidase GI—Hordeum vulgare (Barley).
[1186] UniProt Consortium (2015b). Protein P21—Glycine max (Soybean).
[1187] Unseld, M., Marienfeld, J. R., Brandt, P., and Brennicke, A. (1997). The mitochondrial genome of Arabidopsis thaliana contains 57 genes in 366,924 nucleotides. Nat. Genet. 15, 57-61
[1188] Urao, T., Yamaguchi-Shinozaki, K., Urao, S., and Shinozaki, K. (1993). An Arabidopsis myb homolog is induced by dehydration stress and its gene product binds to the conserved MYB recognition sequence. Plant Cell 5, 1529-1539.
[1189] Usadel & Fernie, (2013). Front Plant Sci. 4:48
[1190] Valente, M. A. S., Faria, J. A. Q. A., Soares-Ramos, J. R. L., Reis, P. A. B., Pinheiro, G. L., Piovesan, N. D., Morais, A. T., Menezes, C. C., Cano, M. A. O., Fietto, L. G., et al. (2009). The ER luminal binding protein (BiP) mediates an increase in drought tolerance in soybean and delays drought-induced leaf senescence in soybean and tobacco. J. Exp. Bot. 60, 533-546.
[1191] Van Gool, A. J., Verhage, R., Swagemakers, S. M., van de Putte, P., Brouwer, J., Troelstra, C., Bootsma, D., and Hoeijmakers, J. H. (1994). RAD26, the functional S. cerevisiae homolog of the Cockayne syndrome B gene ERCC6. EMBO J. 13, 5361-5369.
[1192] Van Hoof, P., and Gaspar, T. (1976). Peroxidase and isoperoxidase changes in relation to root initiation of Asparagus cultured in vitro. Sci. Hortic. 4, 27-31.
[1193] Vick, B., and Zimmerman, D. (1987). Oxidative systems for modification of fatty acids: the lipoxygenase pathway. In Lipids: Structure and Function. The Biochemistry of Plants, (New York), pp. 53-90.
[1194] Vining et al., (2013) BMC Plant Biol. 13:92
[1195] Waditee-Sirisattha, R., Hattori, A., Shibato, J., Rakwal, R., Sirisattha, S., Takabe, T., and Tsujimoto, M. (2011). Role of the Arabidopsis leucine aminopeptidase 2. Plant Signal. Behav. 6, 1581-1583.
[1196] Walter, K. L., Strachan, S. D., Ferry, N. M., Albert, H. H., Castle, L. A., and Sebastian, S. A. (2014). Molecular and phenotypic characterization of Als1 and Als2 mutations conferring tolerance to acetolactate synthase herbicides in soybean. Pest Manag. Sci. 70, 1831-1839.
[1197] Wan, T.-F., Shao, G.-H., Shan, X.-C., Zeng, N.-Y., and Lam, H.-M. (2006). Correlation between AS1 Gene Expression and Seed Protein Contents in Different Soybean (Glycine Max [L.] Merr.) Cultivars. Plant Biol. 8, 271-276.
[1198] Wang, L., Ma, H., Song, L., Shu, Y., and Gu, W. (2012). Comparative proteomics analysis reveals the mechanism of pre-harvest seed deterioration of soybean under high temperature and humidity stress. J. Proteomics 75, 2109-2127.
[1199] Wasternack, C. and Kombrink, E. 2009. Jasmonates: structural requirements for lipid-derived signals active in plant stress responses and development.
[1200] Weisshaar, B., and Jenkins, G. I. (1998). Phenylpropanoid biosynthesis and its regulation. Curr. Opin. Plant Biol. 1, 251-257.
[1201] Whetten, R. W., and Sederoff, R. R. (1992). Phenylalanine Ammonia-Lyase from Loblolly Pine Purification of the Enzyme and Isolation of Complementary DNA Clones. Plant Physiol. 98, 380-386.
[1202] Wong, S.-H., Lonhienne, T. G. A., Winzor, D. J., Schenk, G., and Guddat, L. W. (2012). Bacterial and Plant Ketol-Acid Reductoisomerases Have Different Mechanisms of Induced Fit during the Catalytic Cycle. J. Mol. Biol. 424, 168-179.
[1203] Wurster, B., and Hess, B. (1972). Glucose-6-phosphate-1-epimerase from baker's yeast. A new enzyme. FEBS Lett. 23, 341-344.
[1204] Yamagata, H., Masuzawa, T., Nagaoka, Y., Ohnishi, T., and Iwasaki, T. (1994). Cucumisin, a serine protease from melon fruits, shares structural homology with subtilisin and is generated from a large precursor. J. Biol. Chem. 269, 32725-32731.
[1205] Yan Y, Borrego E, and Kolomiets MV (2013). Jasmonate Biosynthesis, Perception and Function in Plant Development and Stress Responses. In Lipid Metabolism, (Intech), pp. 393-442.
[1206] Yan, Y., Borrego, E., and V., M. (2013). Jasmonate Biosynthesis, Perception and Function in Plant Development and Stress Responses. In Lipid Metabolism, R. Valenzuela Baez, ed. (InTech),
[1207] Yanagita, T. and Foster, J. W. 1956. A bacterial riboflavin hydrolase. J. Biol. Chem. 221, 593-607.
[1208] Yang, J., Schuster, G., and Stern, D. B. (1996). CSP41, a sequence-specific chloroplast mRNA binding protein, is an endoribonuclease. Plant Cell 8, 1409-1420.
[1209] Yang, X.-D., Li, W.-J., and Liu, J.-Y. (2005). Isolation and characterization of a novel PHGPx gene in Raphanus sativus. Biochim. Biophys. Acta BBA—Gene Struct. Expr. 1728, 199-205.
[1210] Yen, S.-K., Chung, M.-C., Chen, P.-C., and Yen, H. E. (2001). Environmental and Developmental Regulation of the Wound-Induced Cell Wall Protein WI12 in the Halophyte Ice Plant. Plant Physiol. 127, 517-528.
[1211] Yu, L., Niu, J.-S., Chen, P.-D., Ma, Z.-Q., and Liu, D.-J. (2005). Cloning, Physical Mapping and Expression Analysis of a Wheat Mlo-like Gene. J. Integr. Plant Biol. 47, 214-222.
[1212] Zakataeva, N. P., Romanenkov, D. V., Skripnikova, V. S., Vitushkina, M. V., Livshits, V. A., Kivero, A. D., and Novikova, A. E. (2011). Wild-type and feedback-resistant phosphoribosyl pyrophosphate synthetases from Bacillus amyloliquefaciens: purification, characterization, and application to increase purine nucleoside production. Appl. Microbiol. Biotechnol. 93, 2023-2033.
[1213] Zhang, D., Liang, W., Yin, C., Zong, J., Gu, F., and Zhang, D. (2010). OsC6, Encoding a Lipid Transfer Protein, Is Required for Postmeiotic Anther Development In Rice. Plant Physiol. 154, 149-162.
[1214] Zhang, J., Song, Q., Cregan, P. B., Nelson, R. L., Wang, X., Wu, J., and Jiang, G.-L. (2015). Genome-wide association study for flowering time, maturity dates and plant height in early maturing soybean (Glycine max) germplasm. BMC Genomics 16, 217.
[1215] Zhang, M., Wang, C., Lin, Q., Liu, A., Wang, T., Feng, X., Liu, J., Han, H., Ma, Y., Bonea, D., Zhao, R. and Hua, X. (2015), A tetratricopeptide repeat domain-containing protein SSR1 located in mitochondria is involved in root development and auxin polar transport in Arabidopsis. Plant J, 83: 582-599.
[1216] Zhang, Y., and Shih, D. S. (2007). Isolation of an osmotin-like protein gene from strawberry and analysis of the response of this gene to abiotic stresses. J. Plant Physiol. 164, 68-77.
[1217] Zhang, Y., Zhang, Y., Qiu, D., Zeng, H., Guo, L. and Yang, X., 2015. BcGs1, a glycoprotein from Botrytis cinerea, elicits defence response and improves disease resistance in host plants. Biochemical and biophysical research communications, 457(4), pp. 627-634.
[1218] Zhao, Z., Liu, H., Wang, C. and Xu, J. R., 2014. Erratum to: Comparative analysis of fungal genomes reveals different plant cell wall degrading capacity in fungi. BMC genomics, 15(1), p. 1.
[1219] Zhihong Hul, Fan Xu1, Liping Guan, Pingping Qian, Yaqiong Liu, Huifang Zhang, Yan Huang and Suiwen Hou. 2014. The tetratricopeptide repeat-containing protein slow green1 is required for chloroplast development in Arabidopsis. J Exp Bot. 65 (4): 1111-1123.
[1220] Zweib, C., Van Neus, R. W., Rosenblad, M. A., Brown, J. D., and Samuelsson, T. (2005). A nomenclature for all signal recognition particle RNAs. RNA 11, 7-13.

We claim:

1. A synthetic combination comprising a reproductive element from a plant, wherein said reproductive element is treated with a formulation comprising a purified Penicillium endophyte population, wherein said Penicillium endophyte is heterologous to the plant reproductive element, and comprises at least one composition selected from the group consisting of:
a. at least 500 nucleotides at least 95% identical to a nucleic acid sequence selected from the group consisting of: SEQ ID NO:1, SEQ ID NO: 2, SEQ ID NO: 4, SEQ ID NO:5;
b. at least 100 nucleotides at least 95% identical to SEQ ID NO: 3;
c. a strain selected from the group consisting of: ______ Deposit ID ______, ______ Deposit ID ______, ______ Deposit ID ______, ______ Deposit ID ______, or IDAC Deposit ID 081111-01; or
d. a Penicillium species selected from the group consisting of: SMCD2206, chrysogenum, olsonii, griseofulvum, or janthinellum;
wherein the endophyte is present in the synthetic combination in an amount capable of modulating at least one of: a trait of agronomic importance, the expression of a gene, the level of a transcript, the expression of a protein, the level of a hormone, the level of a metabolite, the population of endogenous microbes in plants grown from said plant reproductive element, as compared to an isoline plant grown from a plant reproductive element not contacted with said fungal endophyte.

2. The synthetic combination of claim 1, wherein said plant is selected from the group consisting of: soybean, and maize.

3. The synthetic combination of claim 1, wherein the formulation comprises a purified population of the Penicillium endophyte at a concentration of at least about 10̂2 CFU/ml in a liquid formulation or about 10̂2 CFU/gm in a non-liquid formulation.

4. The synthetic combination of claim 1, wherein said Penicillium endophyte is capable of auxin production, nitrogen fixation, production of an antimicrobial compound, mineral phosphate solubilization, siderophore production, cellulase production, chitinase production, xylanase production, or acetoin production.

5. The synthetic combination of claim 1, wherein said trait of agronomic importance is selected from the group consisting of: disease resistance, drought tolerance, heat tolerance, cold tolerance, salinity tolerance, metal tolerance, herbicide tolerance, chemical tolerance, improved water use efficiency, improved nitrogen utilization, improved nitrogen fixation, pest resistance, herbivore resistance, pathogen resistance, increase in yield, increase in yield under water-limited conditions, health enhancement, vigor improvement, growth improvement, photosynthetic capability improvement, nutrition enhancement, altered protein content, altered oil content, increase in biomass, increase in shoot length, increase in root length, improved root architecture, increase in seed weight, altered seed carbohydrate composition, altered seed oil composition, increase in radical length, number of pods, delayed senescence, stay-green, altered seed protein composition, increase in dry weight of mature plant reproductive elements, increase in fresh weight of mature plant reproductive elements, increase in number of mature plant reproductive elements per plant, increase in chlorophyll content, increase in number of pods per plant, increase in length of pods per plant, reduced number of wilted leaves per plant, reduced number of severely wilted leaves per plant, increase in number of non-wilted leaves per plant, or improved plant visual appearance.

6. The synthetic combination of claim 1, wherein said Penicillium endophyte is capable of localizing in a plant element of a plant grown from said seed, said plant element selected from the group consisting of: whole plant, seedling, meristematic tissue, ground tissue, vascular tissue, dermal tissue, seed, leaf, root, shoot, stem, flower, fruit, stolon, bulb, tuber, corm, keikis, or bud.

7. The synthetic combination of claim 1, wherein said plant reproductive element is a seed.

8. The synthetic combination of claim 1, wherein said plant reproductive element is placed into a substrate that promotes plant growth.

9. The synthetic combination of claim 8, wherein said substrate that promotes plant growth is soil.

10. The synthetic combination of claim 9, wherein a plurality of said plant reproductive elements are placed in the soil in rows, with substantially equal spacing between each seed within each row.

11. The synthetic combination of any of claims 1-10, wherein said formulation further comprises one or more of the following: stabilizer, preservative, carrier, surfactant, anticomplex agent, or any combination thereof.

12. The synthetic combination of any of claims 1-10, wherein said formulation further comprises one or more of the following: fungicide, nematicide, bactericide, insecticide, or herbicide.

13. The synthetic combination of any of claims 1-10, wherein said formulation further comprises at least one additional endophyte.

14. The synthetic combination of any of claims 1-10, wherein said plant reproductive element is a transgenic seed.

15. A plurality of synthetic combinations of claim 1, wherein said compositions are confined within an object selected from the group consisting of: bottle, jar, ampule, package, vessel, bag, box, bin, envelope, carton, container, silo, shipping container, truck bed, or case.

16. The synthetic combination of claim 1, wherein the Penicillium endophyte associated with the plant reproductive element is present in an amount capable of providing a benefit to said plant reproductive element or to a plant derived from said plant reproductive element.

17. The synthetic combination of claim 1, wherein the endophyte is present in at least two compartments of the plant reproductive element, selected from the group consisting of: embryo, seed coat, endosperm, cotyledon, hypocotyl, or radicle.

18. A plurality of synthetic combinations of claim 1, wherein the synthetic combinations are shelf-stable.

19. A plant grown from the synthetic combination of claim 1 under water-limited conditions, wherein said plant comprises at least one feature selected from the group consisting of:
a. at least 500 nucleotides at least 95% identical to a nucleic acid sequence selected from the group consisting of: SEQ ID NO:1, SEQ ID NO: 2, SEQ ID NO: 4, SEQ ID NO:5;
b. at least 100 nucleotides at least 95% identical to SEQ ID NO: 3;
c. an endophyte comprising a strain selected from the group consisting of: ______ Deposit ID ______, ______ Deposit ID ______, ______ Deposit ID ______, ______ Deposit ID ______, or IDAC Deposit ID 081111-01;
d. an endophyte comprising a Penicillium species selected from the group consisting of: SMCD2206, chrysogenum, olsonii, griseofulvum, or janthinellum;
e. at least one upregulated gene in root tissue, selected from the upregulated genes listed in Tables 7A, 7B, 7C, 7D, and 7E;
f. at least one upregulated gene in leaf tissue, selected from the upregulated genes listed in Tables 7A, 7B, 7C, 7D, and 7E;
g. at least one upregulated gene in stem tissue, selected from the upregulated genes listed in Tables 7A, 7B, 7C, 7D, and 7E;
h. at least one downregulated gene in root tissue, selected from the downregulated genes listed in Tables 7A, 7B, 7C, 7D, and 7E;
i. at least one downregulated gene in leaf tissue, selected from the downregulated genes listed in Tables 7A, 7B, 7C, 7D, and 7E;
j. at least one downregulated gene in stem tissue, selected from the downregulated genes listed in Tables 7A, 7B, 7C, 7D, and 7E;
k. at least one upregulated transcript in root tissue, selected from the upregulated transcripts listed in Table 7F;
l. at least one upregulated transcript in leaf tissue, selected from the upregulated transcripts listed in Table 7F;
m. at least one upregulated transcript in stem tissue, selected from the upregulated transcripts listed in Table 7F;
n. at least one downregulated transcript in root tissue, selected from the downregulated transcripts listed in Table 7F;
o. at least one downregulated transcript in leaf tissue, selected from the downregulated transcripts listed in Table 7F;
p. at least one downregulated transcript in stem tissue, selected from the downregulated transcripts listed in Table 7F;
q. increase in hormone level in root tissue, selected from the group consisting of: jasmonic acid, JA0ILE, 12-oxo-phytodienoic acid, 10-oxo-11-phytoenoic acid, traumatic acid;
r. decrease in hormone level in root tissue, selected from the group consisting of: abscisic acid, salicylic acid, CA;
s. increase in hormone level in stem tissue, selected from the group consisting of: salicylic acid, cinnamic acid, jasmonic acid isoleucine, 12-oxo-phytodienoic acid, 10-oxo-11-phytoenoic acid;
t. decrease in hormone level in stem tissue, selected from the group consisting of: abscisic acid, jasmonic acid, traumatic acid;
u. increase in hormone level in leaf tissue, selected from the group consisting of: salicylic acid, cinnamic acid, 12-oxo-phytodienoic acid, traumatic acid;
v. decrease in hormone level in leaf tissue, selected from the group consisting of: abscisic acid, jasmonic acid, jasmonic acid isoleucine, 10-oxo-11-phytoenoic acid;
w. increase in metabolite level in root tissue, selected from an increased metabolite in root tissue listed in Table 10;
x. decrease in metabolite level in root tissue, selected from a decreased metabolite in root tissue listed in Table 10;
y. increase in metabolite level in stem tissue, selected from an increased metabolite in stem tissue listed in Table 10;
z. decrease in metabolite level in stem tissue, selected from a decreased metabolite in stem tissue listed in Table 10;
aa. increase in metabolite level in leaf tissue, selected from an increased metabolite in leaf tissue listed in Table 10;
bb. decrease in metabolite level in leaf tissue, selected from a decreased metabolite in leaf tissue listed in Table 10;
cc. at least a 5% difference in prevalence of a taxonomic genus in leaf tissue, selected from a genus described in Table 11A;
dd. at least a 5% difference in prevalence of a taxonomic family in leaf tissue, selected from a family described in Table 11C;
ee. at least a 5% difference in prevalence of a taxonomic genus in root tissue, selected from a genus described in Table 11B or Table 11G;
ff. at least a 5% difference in prevalence of a taxonomic family in root tissue, selected from a family described in Table 11D or 11H;
gg. increase in abundance of microorganisms of the family Glomeraceae;
hh. increase in abundance of microorganisms of the genus Rhizophagus;
ii. increase in abundance of microorganisms of the genus Glomus;
jj. decrease in abundance of microorganisms of the family Enterobacteriaceae;
kk. decrease in abundance of microorganisms of the genus Escherhia-Shigella;
ll. presence of at least one OTU described in Table 11E;
mm. modulation of level of presence of at least one OTU selected from Table 11F.

20. A plant grown from the synthetic combination of claim 1, said plant exhibiting a trait of agronomic interest, selected from the group consisting of: disease resistance, drought tolerance, heat tolerance, cold tolerance, salinity tolerance, metal tolerance, herbicide tolerance, chemical tolerance, improved water use efficiency, improved nitrogen utilization, improved nitrogen fixation, pest resistance, herbivore resistance, pathogen resistance, increase in yield, increase in yield under water-limited conditions, health enhancement, vigor improvement, growth improvement, photosynthetic capability improvement, nutrition enhancement, altered protein content, altered oil content, increase in biomass, increase in shoot length, increase in root length, improved root architecture, increase in seed weight, altered seed carbohydrate composition, altered seed oil composition, increase in radical length, number of pods, delayed senescence, stay-green, altered seed protein composition, increase in dry weight of mature plant reproductive elements, increase in fresh weight of mature plant reproductive elements, increase in number of mature plant reproductive elements per plant, increase in chlorophyll content, increase in number of pods per plant, increase in length of pods per plant, reduced number of wilted leaves per plant, reduced number of severely wilted leaves per plant, increase in number of non-wilted leaves per plant, or improved plant visual appearance.

21. The plant of claim 20, wherein said plant is selected from the group consisting of: soybean, or maize.

22. The plant or progeny of the plant of claim 20, wherein said plant or progeny of the plant comprises in at least one of its plant elements said Penicillium endophyte.

23. A method for preparing a plant reproductive element synthetic combination, comprising contacting the surface of a plant reproductive element of a plant with a formulation comprising a purified microbial population that comprises a Penicillium endophyte that is heterologous to the plant reproductive element, and comprises at least one composition selected from the group consisting of:
a. at least 500 nucleotides at least 95% identical to a nucleic acid sequence selected from the group consisting of: SEQ ID NO:1, SEQ ID NO: 2, SEQ ID NO: 4, SEQ ID NO:5;
b. at least 100 nucleotides at least 95% identical to SEQ ID NO: 3;
c. a Deposit selected from the group consisting of: ______ Deposit ID ______, ______ Deposit ID ______, ______ Deposit ID ______, ______ Deposit ID ______, or IDAC Deposit ID 081111-01; or
d. a Penicillium species selected from the group consisting of: SMCD2206, chrysogenum, olsonii, griseofulvum, or janthinellum;
wherein the endophyte is present in the formulation in an amount capable of modulating at least one of: trait of agronomic importance, transcription of a gene, level of a transcript, the expression of a protein, level of a hormone, level of a metabolite, and population of endogenous microbes; in plants grown from said plant reproductive elements, as compared to isoline plants grown from plant reproductive elements not contacted with said formulation.

24. A method of modulating a trait of agronomic importance in a plant derived from a plant reproductive element, comprising treating said plant reproductive element with a formulation comprising a Penicillium endophyte that comprises at least one feature selected from the group consisting of:
a. at least 500 nucleotides at least 95% identical to a nucleic acid sequence selected from the group consisting of: SEQ ID NO:1, SEQ ID NO: 2, SEQ ID NO: 4, SEQ ID NO:5;
b. at least 100 nucleotides at least 95% identical to SEQ ID NO: 3;
c. ability to modulate the production of auxin;
d. ability to modulate the production of acetoin;
e. ability to modulate the production of a siderophore;
f. utilization of a primary carbon source selected from the group consisting of: L-Arabinose, L-Proline, D-Xylose, L-Glutamic acid, D-Ribose, L-Asparagine, Sucrose, Tween 80, Adonitol, L-Alanine, L-Alanyl-Glycine, L-Galactonic-acid-γ-lactone, β-Methyl-D-glucoside, m-Inositol, D-Galactose, D-Trehalose, D-Glucuronic acid, D-Gluconic acid, D-Mannitol, D-L-Malic acid, a-D-Glucose, Maltose, D-Melibiose, Maltotriose, Pyruvic acid, D-Galacturonic acid, D-Mannose, L-Threonine, Inosine, L-Lyxose, D-Alanine, L-Lactic acid, D-Galactonic acid-γ-lactone, Uridine, α-Hydroxy Glutaric acid-γ-lactone, D-L-α-Glycerol phosphate;
g. secretes at least one protein listed in Table 4C with at least a 2× higher rate, as compared to the strain represented by SEQ ID NO:6;
h. secretes at least one protein selected listed in Table 4D with at least a 0.8× lower rate, as compared to the strain represented by SEQ ID NO: 6;
i. secretes at least one protein selected from Table 4A; or
j. does not secrete a protein selected from the proteins listed in Table 4B.

25. A method of modulating a trait of agronomic importance in a plant derived from a plant reproductive element under water-limited conditions, comprising associating said plant reproductive element with a formulation comprising a Penicillium endophyte that is heterologous to the plant reproductive element, as compared to an isoline plant grown from a reproductive element not treated with said Penicillium endophyte; wherein said Penicillium endophyte comprises a composition selected from the group consisting of:
a. at least 500 nucleotides at least 95% identical to a nucleic acid sequence selected from the group consisting of: SEQ ID NO:1, SEQ ID NO: 2, SEQ ID NO: 4, SEQ ID NO:5;
b. at least 100 nucleotides at least 95% identical to SEQ ID NO: 3;
c. a Deposit selected from the group consisting of: ______ Deposit ID ______, ______ Deposit ID ______, ______ Deposit ID ______, ______ Deposit ID ______, or IDAC Deposit ID 081111-01; or
d. a Penicillium species selected from the group consisting of: SMCD2206, chrysogenum, olsonii, griseofulvum, or janthinellum;
and wherein said trait of agronomic importance is selected from the group consisting of:
e. upregulation of at least one gene in root tissue, selected from the upregulated genes listed in Tables 7A, 7B, 7C, 7D, and 7E;
f. upregulation of at least one gene in leaf tissue, selected from the upregulated genes listed in Tables 7A, 7B, 7C, 7D, and 7E;
g. upregulation of at least one gene in stem tissue, selected from the upregulated genes listed in Tables 7A, 7B, 7C, 7D, and 7E;
h. downregulation of at least one gene in root tissue, selected from the downregulated genes listed in Tables 7A, 7B, 7C, 7D, and 7E;
i. downregulation of at least one gene in leaf tissue, selected from the downregulated genes listed in Tables 7A, 7B, 7C, 7D, and 7E;
j. downregulation of at least one gene in stem tissue, selected from the downregulated genes listed in Tables 7A, 7B, 7C, 7D, and 7E;
k. upregulation of at least one transcript in root tissue, selected from the upregulated transcripts listed in Table 7F;
l. upregulation of at least one transcript in leaf tissue, selected from the upregulated transcripts listed in Table 7F;
m. upregulation of at least one transcript in stem tissue, selected from the upregulated transcripts listed in Table 7F;
n. downregulation of at least one transcript in root tissue, selected from the downregulated transcripts listed in Table 7F;
o. downregulation of at least one transcript in leaf tissue, selected from the downregulated transcripts listed in Table 7F;
p. downregulation of at least one transcript in stem tissue, selected from the downregulated transcripts listed in Table 7F;
q. increase in hormone level in root tissue, selected from the group consisting of: jasmonic acid, JAOILE, 12-oxo-phytodienoic acid, 10-oxo-11-phytoenoic acid, traumatic acid;
r. decrease in hormone level in root tissue, selected from the group consisting of: abscisic acid, salicylic acid, CA;
s. increase in hormone level in stem tissue, selected from the group consisting of: salicylic acid, cinnamic acid, jasmonic acid isoleucine, 12-oxo-phytodienoic acid, 10-oxo-11-phytoenoic acid;
t. decrease in hormone level in stem tissue, selected from the group consisting of: abscisic acid, jasmonic acid, traumatic acid;
u. increase in hormone level in leaf tissue, selected from the group consisting of: salicylic acid, cinnamic acid, 12-oxo-phytodienoic acid, traumatic acid;
v. decrease in hormone level in leaf tissue, selected from the group consisting of: abscisic acid, jasmonic acid, jasmonic acid isoleucine, 10-oxo-11-phytoenoic acid;
w. increase in metabolite level in root tissue, selected from an increased metabolite in root tissue listed in Table 10;
x. decrease in metabolite level in root tissue, selected from a decreased metabolite in root tissue listed in Table 10;
y. increase in metabolite level in stem tissue, selected from an increased metabolite in stem tissue listed in Table 10;
z. decrease in metabolite level in stem tissue, selected from a decreased metabolite in stem tissue listed in Table 10;
aa. increase in metabolite level in leaf tissue, selected from an increased metabolite in leaf tissue listed in Table 10;
bb. decrease in metabolite level in leaf tissue, selected from a decreased metabolite in leaf tissue listed in Table 10;
cc. at least a 5% difference in prevalence of a taxonomic genus in leaf tissue, selected from a genus described in Table 11A;
dd. at least a 5% difference in prevalence of a taxonomic family in leaf tissue, selected from a family described in Table 11C;
ee. at least a 5% difference in prevalence of a taxonomic genus in root tissue, selected from a genus described in Table 11B or Table 11G;
ff. at least a 5% difference in prevalence of a taxonomic family in root tissue, selected from a family described in Table 11D or 11H;
gg. increase in abundance of microorganisms of the family Glomeraceae;
hh. increase in abundance of microorganisms of the genus Rhizophagus;
ii. increase in abundance of microorganisms of the genus Glomus;
jj. decrease in abundance of microorganisms of the family Enterobacteriaceae;
kk. decrease in abundance of microorganisms of the genus Escherhia-Shigella;
ll. presence of at least one OTU described in Table 11E;
mm. modulation of level of presence of at least one OTU selected from Table 11F.

26. The method of any of claims 23-24, wherein said plant is selected from the group consisting of: soybean, or maize.

27. The method of any of claims 23-24, wherein the formulation comprises a purified population of the Penicillium endophyte at a concentration of at least about 10̂2 CFU/ml in a liquid formulation or about 10̂2 CFU/gm in a non-liquid formulation.

28. The method of any of claims 23-24, wherein said Penicillium endophyte is capable of auxin production, nitrogen fixation, production of an antimicrobial compound, mineral phosphate solubilization, siderophore production, cellulase production, chitinase production, xylanase production, or acetoin production.

29. The method of any of claims 23-24, wherein said trait of agronomic importance is selected from the group consisting of: disease resistance, drought tolerance, heat tolerance, cold tolerance, salinity tolerance, metal tolerance, herbicide tolerance, chemical tolerance, improved water use efficiency, improved nitrogen utilization, improved nitrogen fixation, pest resistance, herbivore resistance, pathogen resistance, increase in yield, increase in yield under water-limited conditions, health enhancement, vigor improvement, growth improvement, photosynthetic capability improvement, nutrition enhancement, altered protein content, altered oil content, increase in biomass, increase in shoot length, increase in root length, improved root architecture, increase in seed weight, altered seed carbohydrate composition, altered seed oil composition, increase in radical length, number of pods, delayed senescence, stay-green, altered seed protein composition, increase in dry weight of mature plant reproductive elements, increase in fresh weight of mature plant reproductive elements, increase in number of mature plant reproductive elements per plant, increase in chlorophyll content, increase in number of pods per plant, increase in length of pods per plant, reduced number of wilted leaves per plant, reduced number of severely wilted leaves per plant, increase in number of non-wilted leaves per plant, or improved plant visual appearance.

30. The method of any of claims 23-24, wherein said Penicillium endophyte is capable of localizing in a plant element of said plant, said plant element selected from the group consisting of: whole plant, seedling, meristematic tissue, ground tissue, vascular tissue, dermal tissue, seed, leaf, root, shoot, stem, flower, fruit, stolon, bulb, tuber, corm, keikis, or bud.

31. The method of any of claims 23-24, wherein said plant reproductive element is a seed.

32. The method of claim 31, wherein said seed is a transgenic seed.

33. The method of any of claims 23-24, wherein said plant reproductive element is placed into a substrate that promotes plant growth.

34. The method of claim 33, wherein said substrate that promotes plant growth is soil.

35. The method of claim 34, wherein a plurality of said plant reproductive elements are placed in the soil in rows, with substantially equal spacing between each within each row.

36. The method of any of claims 23-24, wherein said formulation further comprises one or more of the following: stabilizer, preservative, carrier, surfactant, anticomplex agent, or any combination thereof.

37. The method of any of claims 23-24, wherein said formulation further comprises one or more of the following: fungicide, nematicide, bactericide, insecticide, or herbicide.

38. The method of any of claims 23-24, wherein said formulation further comprises at least one additional endophyte.

39. The method of claim 23, wherein said plant reproductive element is a seed, and wherein the Penicillium endophyte is present in at least two compartments of the seed, selected from the group consisting of: embryo, seed coat, endosperm, cotyledon, hypocotyl, or radicle.

40. The method of claim 23, wherein the Penicillium endophyte is present in the plant reproductive element in an amount capable of providing a benefit to a plant derived from the plant reproductive element, as compared to a plant derived from a plant reproductive element not treated with said Penicillium endophyte.

The application's sequence listing, which the Patent Office published only in electronic form, follows.

SEQUENCE LISTING (855 sequences)

SEQ ID NO: 1 - DNA, 542 bp, Penicillium incertae sedis
attaccgagtgagggccctttgggtccaacctcccacccgtgtttattttaccttgttgcttcggcgggcccgcctttactggccgccggggggcttcacgcccccgggcccgcgcccgccgaagacaccctcgaactctgtctgaagattgaagtctgagtgaaaatataaattatttaaaactttcaacaacggatctcttggttccggcatcgatgaagaacgcagcgaaatgcgatacgtaatgtgaattgcaaattcagtgaatcatcgagtctttgaacgcacattgcgccccctggtattccggggggcatgcctgtccgagcgtcattgctgccctcaagcccggcttgtgtgttgggccccgtcctccgattccgggggacgggcccgaaaggcagcggcggcaccgcgtccggtcctcgagcgtatggggctttgtcacccgctccgtaggcccggccggcgcttgccgatcaacccaaatttttatccaggttgacctcggatcaggtagggatacccgctgaacttaagc

SEQ ID NO: 2 - DNA, 564 bp, Penicillium SMCD2206
gtgaacctgcggaaggatcattaccgagtgagggccctctgggtccaacctcccacccgtgtttattttaccttgttgcttcggcgggcccgccttaactggccgccggggggcttacgcccccgggcccgcgcccgccgaagacaccctcgaactctgtctgaagattgtagtctgagtgaaaatataaattatttaaaactttcaacaacggatctcttggttccggcatcgatgaagaacgcagcgaaatgcgatacgtaatgtgaattgcaaattcagtgaatcatcgagtctttgaacgcacattgcgccccctggtattccggggggcatgcctgtccgagcgtcattgctgccctcaagcacggcttgtgtgttgggccccgtcctccgatcccgggggacgggcccgaaaggcagcggcggcaccgcgtccggtcctcgagcgtatggggctttgtcacccgctctgtaggcccggccggcgcttgccgatcaacccaaatttttatccaggttgacctcggatcaggtagggatacccgctgaacttaagcatat

SEQ ID NO: 3 - DNA, 104 bp, Penicillium chrysogenum
cgccctatcctagtttctcggttatttctaggtctctatagacctctatcgtctctctagcgataccgcctagactctctcgccgagtcctagctcttagcgcg

SEQ ID NO: 4 - DNA, 576 bp, Penicillium olsonii
aggtgacctgcggaaggatcattaccgagtgagggccctctgggtccaacctcccacccgtgtttattttaccttgttgcttcggcgagcctgccttcgggctgccggggggcatctgcccccgggtccgcgctcgccggagacaccttgaactctgtctgaagattgtagtctgagacaaaatataaattatttaaaactttcaacaacggatctcttggttccggcatcgatgaagaacgcagcgaaatgcgatacgtaatgtgaattgcagaattcagtgaatcatcgagtctttgaacgcacattgcgccctctggtattccggagggcatgcctgtccgagcgtcattgctgccctcaagcacggcttgtgtgttgggctccgtcctccttctggggggacgggcccgaaaggcagcggcggcaccgcgtccggtcctcgagcgtatggggctttgtcacccgctctgtaggactggccggcgcctgccgatcaaccaaacttttttccaggttgacctcggatcaggtagggatacccgctgaacttaagcatatcaataagcggaggaa

SEQ ID NO: 5 - DNA, 541 bp, Penicillium griseofulvum
attactgagtgagggccctctgggtccaacctcccacccgtgtttatttaccttgttgcttcggcgggcccgccttaactggccgccggggggcttacgcccccgggcccgcgcccgccgaagacaccctcgaactctgtctgaagattgtagtctgagtgaaaatataaattatttaaaactttcaacaacggatctcttggttccggcatcgatgaagaacgcagcgaaatgcgatacgtaatgtgaattgcaaattcagtgaatcatcgagtctttgaacgcacattgcgccccctggtattccggggggcatgcctgtccgagcgtcattgctgccctcaagcacggcttgtgtgttgggccccgtcctccgattccgggggacgggcccgaaaggcagcggcggcaccgcgtccggtcctcgagcgtatggggctttgtcacccgctctgtaggcccggccggcgcttgccgatcaacccaaatttttatccaggttgacctcggatcaggtagggatacccgctgaacttaagca

SEQ ID NO: 6 - DNA, 580 bp, Penicillium janthinellum
gacctgcggaaggatcattaccgagtgagggccctctgggtccaacctcccacccgtgtttatcatacctagttgcttcggcgggcccgccgtcatggccgccggggggcatccgcccccgggcccgcgcccgccgaagccccccctgaacgctgtctgaagattgcagtctgagcgattagctaaatcagttaaaactttcaacaacggatctcttggttccggcatcgatgaagaacgcagcgaaatgcgataagtaatgtgaattgcagaattcagtgaatcatcgagtctttgaacgcacattgcgccccctggtattccggggggcatgcctgtccgagcgtcattgctgccctcaagcacggcttgtgtgttgggcccccgccccccggctcccggggggcgggcccgaaaggcagcggcggcaccgcgtccggtcctcgagcgtatggggcttcgtcacccgctctgtaggcccggccggcgcccgccggcgacccccctcaatctttctcaggttgacctcggatcaggtagggatacccgctgaacttaagcatatcaataagcggaggaa

SEQ ID NO: 7 - DNA, 543 bp, Penicillium incertae sedis
cattaccgagtgagggccctctgggtccaacctcccacccgtgtttattttaccttgttgcttcggcgggcccgcctttacaggccgccggggggctcacgcccccgggcccgcgcccgccgaagacaccctcgaactctgtctgaagattgaagtctgagtgaaaatataaattatttaaaactttcaacaacggatctcttggttccggcatcgatgaagaacgcagcgaaatgcgatacgtaatgtgaattgcaaattcagtgaatcatcgagtctttgaacgcacattgcgccccctggtattccggggggcatgcctgtccgagcgtcattgctgccctcaagcccggcttgtgtgttgggccccgtcctccgatttccgggggacgggcccgaaaggcagcggcggcaccgcgtccggtcctcgagcgtatggggctttgtcacccgctctgtaggcccggccggcgcttgccgatcaacccaaatttttatccaggttgacctcggatcaggtagggatacccgctgaacttaagc

SEQ ID NO: 8 - DNA, 22 bp, Artificial sequence
  Primer
cttggtcatttagaggaagtaa

SEQ ID NO: 9 - DNA, 20 bp, Artificial sequence
  Primer
tcctccgcttattgatatgc

SEQ ID NO: 10 - DNA, 20 bp, Artificial sequence
  Primer
agcggcctctataatcggta

SEQ ID NO: 11 - DNA, 20 bp, Artificial sequence
  Primer
agatatcgctatccgcgaac

SEQ ID NO: 12 - protein, 559 aa, Penicillium chrysogenum
MKWTLASLVALAAPAIASDCHCLPSDSCWPAPSAWASLNSTVGGRLVATVPIGSPCHEPNYDAAACAALKANWNMPQPHFDSSSSVMQTYFANQSCDPFTPKSQPCRLGNYVNYAVNVSSSDQVVAAVNFARDNNIRFVIRNTGHDYLGRSTGAGALSVWTHHLNDIEYKDWSSPTYQGPAFKIAAGVVGYQILEAASAKGLVVVTGECPTVGLAGGYTQGGGHSALSTKFGLGADNTLEFEVVTAAGKLVKASRSENPDLFWALSGGGGGNYGVVMSMVVKAYKDAPIAGASLQFTAANITTDTFYEAVSRFHSLLPAMVDQGVTVIYQMTSSVFIINPITAYNQTTDDVKAILRPFTSALTKLNIKYKASVSQHKSYYDHYNKYMGPLPWGNLAVGSYQYGGRLIPRKTLEQNSNGMASALRNITQAGVIAVGVGMNVSAPVNVSNAVFPALRNAAVTMQIGTPWNETAPWSQMLADQRKMTTEYVPQLEAVTPDSGCYQNEANFRQPNWKQTFFGSNYPRLLAVKRKWDPSSFFYALKAVGSDVWSVSESGRMCRA

SEQ ID NO: 13 - protein, 482 aa, Penicillium chrysogenum
MKFTNIVLAASAATVACAYPRGRDAVPNKQSADIKKRANGFTWLGVSESGAEFGEGNIPGTLEKDYTWPKTSQIQILRDAGMNIFRVPFLMERLVPTTMTGTPDATYMAALKSTVKFITDSGAYAVLDPHNYGRYAGNIISSTSDFKAFWKTVATEFATNEKVIFDTNNEYHDLDQTLVLDLNQAAIDAIRAAGATSQYIFVEGNAWSGAWSWTDNNDNLKALTDSEDKVVYEMHQYLDGDSSGTSETCVSSTIGKERLQSATAWLQENNKKGFIGEFAGGVNSDCQAAVDGMLSYMTENSDVWMGAEWWAAGPWWGSYMYSLEPSDGPAYSTYLPILEKYFVDGTASAPASSSSSAPTSTKSAAQTSTTTAAVDVTSTPSSNVQVPSSVVEPSSSASAPAEASAVTPVVPTPTTVAPTTLVSATSTSTAKPNAQVPTNSPSTGNVAKHYYQCGGINWTGPTVCETGTTCVKQNPYYYQCVA

SEQ ID NO: 14 - protein, 418 aa, Penicillium chrysogenum
MGSSSPSVFTAATVAAAPEDPLFGLMKAYREDPSDKKVDLGIGAYRDNNAKPWILPVVKKADDAIHNDPTLNHEYLSIGGLAEFTSAAQKLIVGADSPAIREKRICTLQTISGTGAVHLGGLFLSKFHPQKPAIYLSNPTWANHNQIFTNVGLTLAKYPYFSAKTKGLDFNGMIAALEAAPQGSVILLHACAHNPTGVDPTEDQWKQIAEVMRSRSHFPFFDTAYQGFASGDLVRDSWAIRYFVEQGFELCVAQSFAKNFGLYGERTGAFHFVSAPGPDAAPACSNIASQLAILQRSEISNPPAYGARIASRVLNDPVLFKEWEADLRTMSGRILEMRQGLRDRLEKRGTPGSWDHITSQIGMFSFTGLSEEQVLTLRSKWHVYMTKNGRISMAGLNTNNIDYFAEAVDSVVRESAKL

SEQ ID NO: 15 - protein, 352 aa, Penicillium chrysogenum
MLPHLLLAAAQLFASSSAALTYNGADISSLLVEEGKGVSYKNLAGTPEKLETILSASGVNSVRQRIWVNPSDGSYDLDYNVKLAKRVQAQGMSTYLDLHYSDTWADPKSQTTPSGWSTTDIGILAGQVYDYTLDVCNTFAANEIDVDIVSIGNEIRNGLLWPLGGTSSYNNIARLLHSAAWGVKDSKLATTPKIMIHLDNGWDSGAQSYFYDQVLAPGSGLVSTDFDYIGVSYYPFYSADATLAALKTSLTNLHSKYKKETLVVETNWPFSCPNPEFAFPTDLKDIPFSVEGQQTFLQRLAKAVEEVGGLGIYYWEPAWVDNAGLGSSCDDNLFFAWSNDQARASLDTLGGL

SEQ ID NO: 16 - protein, 460 aa, Penicillium chrysogenum
MGKEERSHLNIVVIGHVDSGKSTTTGHMIYKCGGIDQRTIEKFEKEAAELGKGSFKYAWVLDKLKAERERGITIDIALWKFQTSKYEVTVIDAPGHRDFIKNMITGTSQADCAILIIASGTGEFEAGISKDGQTREHALLAFTLGVKQLIVALNKMDTCKWSEERYNEIVKETSNFIKKVGYNPKAVPFVPISGFNGDNMLEPSTNCPWYKGWEKETKAGKATGKTLLEAIDAIEPPVRPSNKPLRLPLQDVYKISGIGTVPVGRVETGIISPGMVVTFAPANVTTEVKSVEMHHQQLKAGNPGDNVGFNVKNVSVKEVRRGNVASDSKNDPAAGCDSFNAQVIVLNHPGQVGAGYAPVLDCHTAHIACKFAELLEKIDRRTGKATETSPKFIKSGDAAIVKMVPSKPMCVETFTDYPPLGRFAVRDMRQTVAVGVIKSVVKNAGGAGKVTKAAAKAGKK

SEQ ID NO: 17 - protein, 271 aa, Penicillium chrysogenum
MSAVEEAKRTAAKVAVEKHYPKDARWVGIGSGSTIVYVVEAITNLGVDTSNTKYIPTGYQSKQLIVNAGLMAVEYDALPLGTVLDVAFDGADEVDEDLNCIKGGGACLFQEKIVALQAKEFICVADHRKLQPRLLTSWKSIPIEVAPIAAYRVIQKLKELGSINPAVRPSASVKEGPLKTDQDFFIVDAPFKPMLIKADIEAGQDGNGKDGVWAVEVLARKIKEIIGVLEVGIFHGQTGPQAAAAGGLGGQRPVAAYFGMSDGTVAVRKAE

SEQ ID NO: 18 - protein, 746 aa, Penicillium chrysogenum
MVYLTRGVVATGLTLLAHSVAVTAKESSASPIVADGTHFALNGKNVAYRFHVDNTTGDLLGDHFGGSVGDNIPLEVIGEVNGWVSDIGRVRREFPDQGRGDYRVPAISIRQSEGYTVSEFRYKSHKIIPGKPALPGLPATMGTEEDVSTLVISMYDKYSDVAADLSYSIFPKHDAIVRSVNVTNHGTGNITIESLASLSVDLPYEDLDMINLRGDWAREAQRERRSVAYGLQSFGSSNGYSGHLHNPFLALTEPSTTESQGEAWGFSLVYTGSFTVNVEKGSQGFTRALMGFNPSQLSWVLPPGETLTSPECVSVYSKDGIGGMSRSLHRLYRNHLIKSKFATSDRPTLLNSWEGLYFDFNQSSIYDLAKEAAGVGAKLFVLDDGWFGKEYPRLSDNAGLGDWVPNPDRFPDGLEPLVKKITDLKAANTSTNMRFGIWFEPEMVNPNSTLYDEHPDWALHAGPYPRTEARNQLVLNLALPEVQDYIIKSVSDVLKSADISYVKWDNNRGINETPSPATNHAYMLGMYRVFNELTTQFPDVLWEGCASGGGRFDPGVLQYFPQIWTSDNTDAIDRISIQLGTSLAYPPSAMGAHLSEVPNHQTGRTVPVAVRAHVAMMGGSFGLELNPAVMDEEDKAAVPGLVALAEKVNPIILNGDMWRLNLPEDSNWPAVLFIAEDARKAVLFVFQVAPNVNHSWPRIKLQGLDPQASYKVDDGVVYTGATLMNIGLQFAFKGDYGSQVVMLEKQ

SEQ ID NO: 19 - protein, 296 aa, Penicillium chrysogenum
MMTYSRLIPFALFALFGTGLAQTVDGSKFNKPDGGPPGSYFAAGSSIPVAALQSAAAKARTPVPDATYPINGDNGAKKVTIHSDWAKFDKGAAYVWIADMDVDCDGIDYKCKGNPDGQHQTNFGALAAYEVPFFVIPDRFGTKYAKQLPGNNVGAVICNGKMFYGIYGDSDGDTPQVIGEASWLMARTCFPNDDLNGNSGHGDVDVTYILFTGDDSVLPSSALNKNYVTNFTTLRSMGDKLMTALAKNLKLVDGGDGGSPTTTAGSNPTSGSCASRKDENDCSDQLVCKSGKCASD

SEQ ID NO: 20 - protein, 146 aa, Penicillium chrysogenum
MTTFDVFCTLTVIDMREAERAEAALVEEAKKEADRIANLSSSPGDAAKGAKLFQTRCAQCHTVEAGGAHKVGPNLHGLFGRKTGSSEGYAYTDANKQAGVEWNQDTLFSYLENPKKFIPGTKMAFGGLKKTKERNDLITYLKESTA

SEQ ID NO: 21 - protein, 760 aa, Penicillium chrysogenum
MQSEKGLLLDVSEVYDSEDNDFVPSHTRYKKLQGARPCWATTLKKGLCVFVITILITYYLGFPHGSLSTEKKPSPHPEAPPLCQSQECIHAASEILYNLDPDYENIDPCTDFDRYVCGGWRERHDMRPDQGSIFAGTIMHENAQTKLRHILERTEPPQPSDADNFKKLKAAYDACLDEATVNKRGSKPLTDILDELRTIYPAKAGLVKGAQDQLTNALLYLANAGVEALASSGVTPDDRDPDNVVIMISPPREIGLPAREYYNNTKTVADYTAVLKQVVQRLAGDGFDKTAEDVVAFEKKLADVTPDTQTQEDVTKYYNPLNVKETEALVPEISFTDIISSLAPHDYKGDRLIVGSPSYMKALSVLLKDTPRETILLFLQWKIIQAFAEVVEDASIEPLRRFENVLAGKEPQAKEERWRKCLGRLDEGLEWSLSRFYVLDAFSEDSKKLGDQVVSDIKERFIFTLDQTSWMSPEVRKLGIEKVGNIIQKIGFPTKSPNVLDPEDVNKFYRDLELSKDTFFENEVAVARFQLRREWSKLGKPTNRDEWGMSAPTVNAYYNPPGNEIVFPAGIMQPPAFYGPSAPLYLAYGAFGAVSGHELSHAFDSTGRHYDESGNYTNWWDDKTVEAFEERAQCFVDQYSKFTVIGPEDKVLHVNGRLTLGENIADAGGLTASYHAWKKHDEAKPDLHLPGLDAFTKEQLFFISYGNWWCGKTTKEAAEQAIYNDPHAPKSARIIETMANSREFKNAFSCPDKKPACKLW

SEQ ID NO: 22 - protein, 356 aa, Penicillium chrysogenum
MRFFLGAALSLLSSTLVAAQTYTDCNPTQRSCPADPAFGQSDKTFDFTSGASDAFKSTGSVTYDQTNGATFTISKQGDGPLIQSGWYIMFGRVEFTIKAAPGTGIVSSAVLQSDDLDEIDWEWLGGNNAQVQTNYFGKGDTSSYSRGAYHDNAGNHDDFHTFSIDWTSTQIVWAIDGKTVRVLTPETADTNRYPESPMMIKVGVWAGGDSNNPQGTIDWAGGQTDYSQGPFKMYLKSMTVTDYSTGTSYRYGDRSGSWKSIIAEGGQINGNKGAEPTSTESAPAITATIDSVPVPWSGTHKETTSWVTPNVWPWVATGSPLASSTGYQYEWESSSGHNKPPGGGSMSEQSPESLLD

SEQ ID NO: 23 - protein, 310 aa, Penicillium chrysogenum
MASLPTTYDGPVRIAVIGGTGLRELPGFTQVASLNVTTPWGAPSSPITILHHECKHNNKVVAVAFLSRHGLHHQIAPHEVPARANIAALRSIGVRSIIAFSAVGSLQEEIKPRDFVIPDQVIDRTKGVRPWTFFEGGIVAHVPFGDPFDEGIAKVVRECGHSLEGDGVVLHDRGTLICMEGPQFSTRAESKMYRSWGGSVINMSALPEAKLAREAEIAYQMICMSTDYDCWHEATADVTVEMVMGNMKSNADNARRFVTAVLDALASDEHSELVQAKHLAGGIKFGVSTPQTNWKPEAKEKLDWLFPGYW

SEQ ID NO: 24 - protein, 1070 aa, Penicillium chrysogenum
MQFKSLTCAVLPLLLDLVSGSPDGRIARCFREHTGSGSANLSNNVYQTGFDGVTWDEDNWLLSSTNLEQGRYQSRGSVANGYLGINVASAGPFFEIDSPEDTNGWPLYSRRQAFATISGFFDSQPTTNGSNFPWLSQYGYDSVISGIPHWAGIILDLGDGTYLDAKVDNKTISDFQTTYDFKAGVLVWSYKWTPQGNKGSYQITYRLLAHKLYVNQAVVEMEVIPTTASDATIVNVIDGASAVRTDFVETGEDNGAIFSAVRPNGIANVTAYVYANLTGSPNVDLSSRKIVSDKPYVHSNESSIAQAVDVKFKPGQLVRVIKYVGGASTDAFVDPKQTAKNAVSAGMRNGYTQSLRTHLMEWQNVMPEGSVDHYAFPNGTLPADSHIIDLAVISVTSTYYLLQNTVSKNAVKETAGAPVNMDSISVGGLTSDSYGGQVFWDADVWMQPGLVASHPEASQRFTNFRVAQYAQAQENIETALAGSKNQTHFSPSAAIFPWTSGRFGNCTATGACWDYQYHLNGDIGISLVNQWVTSGNTKVFKEEHFPVYDSAATLFADLLVRNGSHWTLTNMTDPDEYANHVDAGGYTMPLIAETLRNANDFRQQFGLEENATWEQMADNVLVLRENEVTLEFTTMNGSAVVKQADVVMVTYPLGYTANYTSQNSLNDLDYYAAKQSPDGPAMTWAIFSVVANEMSPSGCSAYTYAQYSYKPYTRAPFYQMSEQMVDNTTINGGTHPAYPFLTGHGGSNQVAIYGYLGLRLIPDETLHVDPNLPPQIPYLKYRTFYWRGWPISAWSNYTHTTISHAIEAAPLDTADQRFANKTITIHSGTEDDGTTYHLPPKGSVVIPNRQIGSENTVAGNLVQCQAVSSPDAFEPGQFPLSAVDGAASTKWQPSLAAEVNSVTVSFEDEVGAMVSGFYFDWAQAPPVNATVIFHNKTLGDPAKALSAESSDYTIVHSLTEITQSDPYEHETTNLDIIAIPTGNTTNVTLPSPVPAARYASLLIVGNQALDSVDVEAKNGTGATVAEWAILGQEKTRPASGPNPANKKMKVRAAAVADADAFMRRRREFMF

SEQ ID NO: 25 - protein, 266 aa, Penicillium chrysogenum
MPIPVPKADRLLDLLSLKGKVVVVTGASGARGMGIEAARGCAEMGADLAITYSSRREGGEKNAKELSEEYGVKVKPYKCDVGSWESVETLVKDVLKDFGKIDAFIANAGRTADSGILDGSVEDWNEVINTDLTGTFHCAKAVGAHFKERGTGSFVITSSMSGHIANFPQEQTSYNVAKAGTIHLARSLANEWRDFARVNSISPGYIDTGLSDFVAKDVQDLWNSMIPMGRNGDAKELKGAYVYLVSDASTYMTGNDLLIDGGYTVR

SEQ ID NO: 26 - protein, 270 aa, Penicillium chrysogenum
MKFSTTILSAALLTASAIAAPLTERRAARHAARAADRAGRISRPAAKQDTLELVSLNGTSHAQYSSNWAGAVLIGTGYTSVTGEFTVPKPNLPSDASSGQQSCASAWVGIDGDTCSSAILQTGIDFCIQGGEVSYDAWYEWYPDYAHDFSGIDISTGDVIKLTVTATSKSSGSAVIDNVTTGKSVTHKFSGVDDGDLCETNAEWIVEDFESGGQLVPFTNFGTVTFTKAEATSGGKSVGPSGATLFEIRQSKKVLTKSSVTGNSVTVSYV

SEQ ID NO: 27 - protein, 448 aa, Penicillium chrysogenum
MAAPAQKFKVADLSLAAFGRREIELSEVEMPGLMAIREKYGADQPLKGARIAGCLHMTIQTAVLIETLTHLGAEVTWTSCNIFSTQDHAAAAIAAAGVPVFAWKGETEEEYQWCLDQQLQAFKDGKKLNLILDDGGDLTSLVHTKYPEMLDDCFGVSEETTTGVHHLYKMMKENTLKVPAINVNDCVTKSKFDNLYGCRESLIDGIKRATDVMIAGKVAVVAGYGDVGKGCAQALHSMGARVIVTEVDPINALQAAVQGYEVNTMEAAAPIGQIFVTTTGCRDILVGRHFEAMRNDAIVCNIGHFDIEIDVAWLKANSQSVQNIKPQVDRYSLNGKNIILLAEGRLVNLGCATGHSSFVMSCSFSNQVLAQIALFKAEDEAFGKKYIEFGAGGRKPVGVYVLPKQLDEQVARCHLDHVNAKLTELTPVQAEYLSLPVNGPFKPEIYRY

SEQ ID NO: 28 - protein, 488 aa, Penicillium chrysogenum
MLTLNVLTALLAPSVLSSALPARDLNARADSKPAALQAILNNIGADGSAVSGASAGVVVASPSKSDPDYFYTWTRDAALTYKVLIDEFIAGDTSLEPTIQDYVSAQAKLQAVSNPSGDLSDGSGLAEPKYHVDLTAFTEAWGRPQRDGPALRATALITYGNYLISKERTSVVKSNIWPIVQNDLNYVAQYWNQTGFDLWEEVEGSSFFTIAAQHRALVEGSAFAKALGESCEGCDSQAPQVLCFQQSFWDGKAIVSNFANNGRTGLDANSVLTSIGNFDPKAPCDDVTFQPCSARALSNHKLYVDSFRKIYPVNSGKEAGTAVAVGRYSEDTYMGGNPWYLTTLAAAEQLYDALYQWKQLGSLEITEISLPFFKDLVSSAAAGKYPSSSETYTSITAAVKKYADGFVAVVKEHTPSDGSLAEQYTRDNGSPASAKDLTWSYAALLSATRREAGTVPPTWGASTANKVPSKCEGSSAKGSYTTPSVGKW

SEQ ID NO: 29 - protein, 88 aa, Penicillium chrysogenum
MKPVVSALNAWSCVIISVFAIVILSVLGSLYNSNNHAYTGSEGEPKDGPAVAASIYTAVIVYAGFFVFCGFQAYLHMRDSRGGAISLH

SEQ ID NO: 30 - protein, 865 aa, Penicillium chrysogenum
MKFAWFEVAALTASVANANSLAYSPPYYPSPWMTGEGDWSEAYTRAVEFVSNLTLAEKVNLTTGSGWMQESCVGETGGIPRLGMWGMCMQDAPLGIRFSDYNSAFPAGVNVAAAWDKRLAYQRGVAMGEEHRDKGVDVQLGPVAGPLGKFPDGGRNWEGFSPDPVLTGVMMAETIKGMQDAGVIACAKHFIGNEQEHFRQSGEAQGYGYNISQSLSSNIDDKTMHELYLWPFVDSIRAGVGSVMCSYNQINNSYGCANSYSLNKLLKGELGFQGFVMSDWGAHHSGVESALAGLDMSMPGDVILGSPYSYWGTNLTISVLNGTMPEWRVDDMAVRIMSAYYKVGRDRFRTPPNFSSWTRDEYNFQHSMVSEDWGKVNERVNVQRDHAQIIRKIGSDSTVLLKNKGGALPLTHNEKFISILGEDAGSNAHGANGCDDRGCDNGTLAMGWGSGTANYPYLITPEQAIQNEALEYSNGQTNVFAVTDNWALTQMAALASQADVALVFVNADSGEGFINVDGNEGDRKNLTLWKNGEEVIKTASQHCNNTIVVIHSTSAVLISDWYDNDNITAIIWAGLPGQESGHSLVDVLYGRINPGGKTPFTWGKTRKDYGPPLVTVPNNGADAPQDNFEDGVFIDYRRFDKDNIEPIYEFGYGLSYTKFAFSDIKVTPLASSQRGEYKVTTGKSQKAPVLGEPSTVSDNLFPEGIKRVRQYLYPWLNSTDLRASSGDPDYGMDSKDYLPEGATDGSPQDLLPSSGSSGGNPGLFEDLYQVTATITNTGSVTGDEVPQLYLSLGGNDDPTKVLRQFDRVTIAPGQSLQWTTTLTRRDVSNWDVASQNWVISGAQKKVYVGNSSRKLPLSADLPLVE

SEQ ID NO: 31 - protein, 426 aa, Penicillium chrysogenum
MARSLLLVALSLGAAAMPAASGMSNIKNIVVLVQENLSFDHFAGGLDYDSSIDGPQNPQYCNPANVSSPSEQVCANPDAKNIASDDPNHSIAGGNMQVFGTYHPLAGAKSTMEGFISEQRASYPKDDLDRAAEAINYFTPEHIPVFDTIAQNFVLFDRWFAAVPGPTNPNRAYLTSGTSHGHGHNDDDFLNSALPQKSIFEQLSEKGITWKNYENSTQSKPSFLPDAMFYEWTAKNGKENVVPISQFYSDAKAGALPQFTWINPECCSFMSMHPPSPINMGENFVKSIYEAVRNSPQWNETLFILTWDEHGGFADHVSPPTDVPAGDSLTYTETARDGEPYTFHFDRLGIRVPTVLISPWVSKGLVQHKPSDGNEFTHTSILKFVSELWGLDSLSPRVDWSPSFGNLVTNSFRSDTPEKLPDAADF

SEQ ID NO: 32 - protein, 494 aa, Penicillium chrysogenum
MSSSLLDQATRIARDFDYPAEKVQRGVAEYIKQSNEGLTKEGTTLSQIPTFVTAVPNGTEKGLYLAVDLGGTNFRVCSVLLHGDTTFSLTQSKILIPRELMASGTSKDLFLFLARQIEAFLRIHHNEHFEAHLLRRREGNTEEDLFDLGFTFSFPVRQCGINRGTLIRWTKGFNIPDAVGHDVCALLQSAIDELSLPVRVAALVNDTVGTLMARSYTSPGETGTFIGAIFGTGTNGAYVEKTKNITKLQHMKDAHFEDSTGEMIINAEWGSFDNHMSVLPTTVFDDELDADSNNPGVQMFEKRVSGMFLGEILRRALLSLYRADLGLFQANKDSKVVLPEGSMLFRQWGLDTSMLSSVEADTSEDLVDVKTALKDHLEIENPSLEECQAVKTIVHAIGKRAARLSAVPLAAIVVHSNKLQTDDMIDIGVDGSLVEFYPNFEGHLREALREVPEVGAAGDKRIRIGISKDGSGVGAALIALVANKTEGFEIPREN

SEQ ID NO: 33 - protein, 529 aa, Penicillium chrysogenum
MKFSLVALATLAGVAVADLDPIVIKGSKFFYSSNDTQFFMRGIAYQQESTTSSGYIDPLADPTACARDVPMMAKLRTNVIRTYAINASADHSECMKLLADAGIYVISDLSQPKLSIDRSDPTWETDIFARYTSVVDELAQYNNTIGFFAGNEVANSVNTSDSSAFVKAAVRDTKKYIKDKGYRPMGVGYATADVADIRADMADYFNCGEADESIDFWGYNIYSWCGESTYAKSGYKDRTEEFANYSVPVFFAEYGCNEVTPREFTDVKALYGEPMADVWSGGIVYMYFQEANNYGLVSVVDSTSVSTLADFKYYSSQIASVNPTGVKKASYTPTNTALRSCPTVGSSWSAEPSPLPPVADIQLCDCMYDASACVVADSLSSTKYAKLFSTVCGYTDCSGLTANATTGEYGAYSMCSTKQQLAFALNKYYVEQNRAADACSFAGSATVKSVTKATGTCATQMKEAGTAGTGTITTENTGIAGSGSASSTGSSTTSSSGAISMHSSSSFGSFQVAAYIATALLAGVGMIAL

SEQ ID NO: 34 - protein, 613 aa, Penicillium chrysogenum
MAPRFWTALWALTFGHAVVATPQILAPRATASLDTWLASETVVARQGILDNIGSAGAHAANAKPGVVLASPSTSDPDYYYTWTRDSALVFKNLVDMFRSGDSALLEVIEEYISSQAYIQTVSNPSGGLSGGGGLGEPKFNADETAFTGSWGRPQRDGPALRATALISFGQWLIDNGYTTYATDIVWPVVRNDLSYVSQYWNQTGFDLWEEISGSSFFTVAAQHRALVEGSTFASQSFWTGSYILANFGGGRSGKDANTLLGSIHTFDPEAGCDDTTFQPCSARALANHKVVTDSFRSIYSVNSGIAAGKAVSVGRYPEDSYYNGNPWYLCTLAAAEQLYDAIYTWNHIGSLTITSVSLSFFKDLYSSAATGTYSSSSDTYSSIVAAVKEYADGYVSIVEKYAASSGSLSEQFSKSDGSQLSARDLTWSYAALLTANERRNAIVPAPWGETSASSVPGQCQYTSAIGTYSSATNTAWPTTLTSGSGSVTTTKTTTTTSKTTTTTTSCTTPTTVAVTFNVIATTEYGQNIKLAGSISQLGSWSPSSAVALSASKYTTSNHLWFVTVTLPVGTSFSYKYIQVASDGTIKWESDPNQSYTVPATCGTTAITISDTWR

SEQ ID NO: 35 - protein, 251 aa, Penicillium chrysogenum
MSGISKACCSIPPVVSKGYQAKGEYKIINGLKTYVTGPESATKAILVIYDIFGFFDQTIQGADILATSTDQKYRVFIPDFFEGSPADISWYPPTTQEHKEKLGNFFSTKAAPPQTLSKIPNVVAEGNKLAPGGNFQSWSILGYCWGGKIATLASGAENKLFKAVAQCHPAMVDPNDAKVVNIPMVFLASKDETPKDVKDFEANLKVPKYVETFPTQIHGWMAARSDLENPEVRKEYERGYKTVLEFFHEHS

SEQ ID NO: 36 - protein, 465 aa, Penicillium chrysogenum
MTTVDTILAAKYPAKAHALRVSESLKARHGGAGVIYLEAQKTRLIEDSDEDMPFRQRRPFFYLTGCLLPDAAVVYDAVKDELTLFIPPINPESVIWSGLPLSPEEAAKLYDVDRVLFTTDVNSTLASIASSHNGQTAAFAIAEQVSEGTSFQGFAETNTTSLKTAIEETRVIKDAYEVALLRKANDISTKAHVAAIHASKTATNERQIEAAIIGACIANGCREQSYHPIVAGGEGGATLHYVRNDVDLVDPVTKQRKNNVLIDAGGEYQTYCADITRVIPLNGRFAPETRQIYEIVLQMQTECIAMLKEGVCWDDVHALAHRIAIRGLLKLGILRGSEDELFEKRVSVAFFPHGLGHYLGMDTHDTGGNPNYEDKDTMFRYLRVRANLPAGSVVTVEPGIYFCRFIIDPILKAPETGKYIDTEVLERYWSVGGVRIEDNIHITKDGSENLTTAPKSIEEVESLAL

SEQ ID NO: 37 - protein, 837 aa, Penicillium chrysogenum
MLGALTVLLAGLSGGTYSHPTKETKTDTTYHDNADVLKYVNPLVGTYGTTPNGNGGMIPSVSPPFGMTRWTPQTRENFISQVPYGDSDRLIHGFQATHQPAIWMGEAGQVVLTPGIGEVQPLFQNRGLQFQKRDETSTPYVYEVLLDATQLLGCDWNATAEAVGDGPVPGGAGSVPVEVKEGANGRTRKRQVESVLRGRHGDHYQQSVKVAMSADTHVGHLRFDFEHTPTNADSKGQPWVFIQASRRNWTGEVHIDQSRREVYGYNTERQDYLLGPDKASSAKGYFVSRFSEPFTELGVANGGSTIKDEVRRHGNFTGAYVKFASSTSRVEVRTGVSYVSVSQARKNLDIQAPDENTFEDTVEKVKSAWLEKLGRVSIKGVNKTDADNDPRTIWYTGLFHALQYPSDFSEPTSNQEGAPRVFYSGYTDSVHTENDSYYQSWSIWDTYRAEHSLLTLFAPERVNSMMRSLLRIFDWSGWLPMWANLVETNIMIATNADVVLANALERGYKDFDIGKAWNAVKKNAYTPPDHDTDTLYYDRQPGTSYEVRAGLTSYMKQGWVSNDGWSEAGSRTLDYAFNDYACSVVAAHAGEDNATVQALKKRGGNYAYLWNNETQYMRARNANGTWANNTFGWTEGDDWVYTFDVMHDVKGLAELFGGREAFREKLDAHFQGGHNDHTNEPSHHVPYLYSTLGYPNQAAETIRDIAWANYNATSGGLGGNEDLGQMSAWYVFSALGFYPVNPASDEYIVGTPFFEEVSIRLPIGGSTGGHHASGIERTLKISAPGASTKPYVGSLKVDGKRINAPILKHSQLVYAARIEFEMSSTPTSWGSRPLWEA

SEQ ID NO: 38 - protein, 371 aa, Penicillium chrysogenum
MRSWFSFFLLALITILGVTNVNAEYTGTDCNPLNKTCSADPALGTEHTWLFNSTLDSELWDMRTGTLDYTSEGADFSIKTENASTLLVSNFYIFFGVMEAHVKMAKGAGIISSVVLQSDDLDEIDWEWVGYNTSGVQSNFFGKGNTTTSDRGGYHAVSNADTEFHNYTSYWDRDRLEWWIDGDLVRTVNYSEPLTVYGKNYPQTPCQVKVSNWPVGIKGQSQGNLDWGGGLVDWSDVPFTMTVSKIRVQDFSSGKEYKYTGRTGTYDSIEVISGNSTAITQINKKPAKTLSQKWDDLGQGAHIGVYCGAAVAGALLIGIFVFYCLKQRRDGRLQRALNDGEYSAELTTLEESKLRWRQSELRSKGSYQPVP

SEQ ID NO: 39 - protein, 331 aa, Penicillium chrysogenum
MWSSMKSTSTWALVTLSLLPAVLSSPLFEKRAKGAWLGLNTNFPDPSFMKAADNKWYAFGTNGNGKRVQVAVSDNFKTWTLLDVEALPTLSTWETENDHWAPDVVMRDDGKYVMYYSGEAKSYLRHHCVGTAIADHPAGPYVPSNTPLSCRLDRGGSIDPAGFKDKDGSRYVVFKVDGNSIGNGGDCNNGVEPLVSTPILLQKVGADGVTPIGDAVQILDRNTADGDGPLVEAPNLILHGDTYFLFYSTHCFTDPLYDVRYATAKSITGPYTKTNVPLINAAKTGLISPGGGNVCGCGDRMLFHGFCTEERTSRCMYVADVIIEGNTASIA

SEQ ID NO: 40 - protein, 782 aa, Penicillium chrysogenum
MRLLCSILTALYASNAIATKDYSDDFDVLKYVDPLIGTANGGHVFAERLTSTGMAKAVADTTGENQAGFAYDTEVVTGFSHMHDSGTGGSPSMGNFPIFAQGNCPHDDINQCKWQQSDRAAVWDRESPEARPGYFSISLANGVHAKMTTTNRSALYRFTFNEPSTQPLSPVVLLDLMDLPRSRRSGSADVDRSTGRLTGSGTFSPSFGIGSYKSYVCVDFKGAELRDTGIWERNQPDISRRTLNLGSDASSFLSAGAFARFHAPKDNNILVRVGVSFISVHQACSNAEREQPDFDFEGTVSAAESAWRKKLDVISVDADGVSSDLQTVFWSGAYRTFISPQDYTGENPLWKSDEPYYDSYYCIWDSFRSIHPLLTLVDPFSQSLMMRSLVDTYRHEGYLPDCRMSLCKGFTQGGSNADVVMADAYLKKVPGIDWDTAYEAVVKDAEVEPKNWDVEGRGGLRSWKNLGYIPLDDYDPDGQGTHTRSISRTVEYAYNDFCIAEMAQGMGHQADYEKYTKRSGNWVHMFNPDQRSSIKGVDTNFTGFLQPRYTNGTWGYQDPILCSPLLDFTGCYLNPDGHETYEGSAWMYTFYAPHDMGALIKTLGGAESFTSRLSYLHDSGLLYMGDEQAFLPVYQFHYSGRPGLSAKQSHFYIPSQFNTTVNGIAGNDDSGAMGSFVVLNMMGLWPVPGQDVYLITPPYFKEVSIRNALTGKVATIRNINFDPSYESIYIQSAKWNDKPWTKNWITHDFFADGGVLELVLGPKESEWGTHIQDLPPSLSDYH

SEQ ID NO: 41 - protein, 538 aa, Penicillium chrysogenum
MKASIIAGLSLLGAAMAADIPSIEIKGKKFFYSNNGTEFFIRGVAYQPEYTGRNGGSSESKYTDPLAIDTCKRDIPYLTQLRTNVVRTYAVDPSKDHDECMNALADAGIYLITDLSSPSESIVSDDPTWNSDLFTRYSQVVDAFAKYPNVIGFFAGNEVANKVNNTNSMAYVKAAVRDMKSYIKEKNYRSSLAVGYATDDDATVREAVSNYLICDEAADSIDFFGYNIYEWCGDSSFQKSGYAERTKEFADYPVPAFFSEYGCNEVRPRKFTDVPVLYSDKMTDVWSGGIVYMYYEEANKYGLVSVDGDDVKTLPDFSNLSKQMASATPTGVESAKYSVSTTVGRSCPTVGSDWNAASKLPPSPNADLCECMYNSLECVPNSDITDKQVGSTFGYLGGEDGVMAGVLSNATSGTYGAYSMCSAKQRLAWAMNVYYQKNKGKAGSEACGFNGVAKTKKSTSASGSCATQMSAAGSAGTGAVSGGLAASTGAGASGTGAGGATSSGIAAGTVPQAVHIGVWQAGAYAVAAVASGVFMIML

SEQ ID NO: 42 - protein, 518 aa, Penicillium chrysogenum
MFKSGLARSFGRAAFARTTPVARAFQPVRSNALPALARFASSDATLTGKVHQVIGAVVDVKFSGEKLPAIYNAITTTNNGQKLVLEVAQHLGENVVRTIAMDGTEGLSRGVAAEDTGAPITIPVGPSTLGRIINVTGDPIDERGPIKATKFAPIHAEPPAFVDQSTSAEILVTGIKVVDLLAPYARGGKIGLFGGAGVGKTVFIQELINNIAKAHGGYSVFCGVGERTREGNDLYHEMQETGVIQLEGDSKVALVFGQMNEPPGARARVALTGLTIAEYFRDQEGQDVLLFIDNIFRFTQAGSEVSALLGRIPSAVGYQPTLAVDMGVMQERITTTQKGSITSVQAVYVPADDLTDPAPATTFAHLDATTVLSRGISELGIYPAVDPLDSKSRMLDPRIIGEEHYATASRVQQMLQEYKSLQDIIAILGMDELSEADKLTVERARKLQRFLSQPFAVAQVFTGIEGTLVDLKDTIASFKAIIAGEGDDLPEAAFYMVGDINAARAKGEKILAELENKA

SEQ ID NO: 43 - protein, 994 aa, Penicillium chrysogenum
MVGVKNLLSGAWLLAYGAFSRSASTASGSHSAASPTSSGKYTQFTIPASAEAGAQLIANIHDPEAVDAQSVCPGYKASNVKESARGVTATLTLAGKPCNVYGTDVDSLDFSIEYLANDRLSVQIVPTYLDSSNYSWFMLDEHVVPRSISDRQASKQDSDLEIAWSNEPSFYFKVTRKATGDAIFDTTDSVLVFENQFVEFVTSLPKDYNLYGIGEHIQQLRLLNNLTLTLYASDISDPIDDNVYGSHPFYLDTRYYEVNDKGHHTLVASDKAAQSKDYVSFSHGVFSRNAHGQEVVMNPEGLKWRSLGGSIDLTFYSGPSQADVTKNYQLSTIGLPALQQYFTFGFHQCRWGYNNWTELEEVVSNFEKFEIPLETIWSDIDYMHGYRDFDNDQHRYPYSDGEKFLDKLHSSGRHYIPIIDAAIYIPNPKNASDTYDTYTRGHQEDVFLKNPDGSEYIGAVWPGYTVFPDWHNPKTGDFWANEIVIWHKKVAIDGIWIDMNEVSSFCTGSCGSGNLRMNPTHPAFALPGEPGNVIYDYPEGFELSNKTEAASASAASFSQAATATTGGSTSSSTSYLRTTPTPGVRNINYPPYVINHDQDGHDLSSHAVSPNATHSDGVQEYDVHNLFGHQILNATYHALLKVDEKKRPFVIGRSTFAGSGKWAGHWGGDNASRWAYMFFSIPQALSFSLFGIPMFGVDACGFNGNTDEELCNRWMQLSAFFPFYRNHNTLSAISQEPYIWESVTAATKSAMKIRYAILPYFYTLFHEAHTTGSTVMRALAWEFPTDPSLAAVDTQVLLGPSIMVVPVLAPHATSVRGVFPGLKHGEVWYDWYTQTAVDAKPGVNTTIPAPLGHIPVFVRGGSVVPMQEPALTTKEARGTPWSLLVALGGSGTATGQLYLDDGESNAPDDTLDVTFSVKESSLSARAKGSWEELNPLATVTVLGVSTQPDAVKLNGIPVPASGVQYNATSRVLSVGGLQKLTRKGAFSADWALKW

SEQ ID NO: 44 - protein, 660 aa, Penicillium chrysogenum
MRASSISALACFASFAAAQTFQRLGGCPDLGCIFPPDQVDFLAGQYFDIRLEVHSPVNGSEARVGEPDENFTFTVAKKGKEAVTAPEYFKIDEPELERWNFTWFEDRFAEDAEKPSLVNVTSKVYRRIALYEPGEYEATLTYYGEQKTVANWFVRDLPSKRRAKNVVMFIGDGMTTNMITAARLIAHRSINGKYLTTMAMDKFPVLGHQMTHSMDSFITDSANSATALYTGHKTTVNALGVYVDSSEDTFDDPKFETIAEIYRRKNPNAGVGIVSTAFLADATPAGLGAHTSDRGDYDHVISAYYESLTDYEWTNWNGPDVLLGAGAENFVQSEETRDYYKLFAEKGYNVAWNNTALSNAPSDERLLGVFSTNNLPTWLDRNVYQSNLYNQSNYPDGSDRDADDLPGLKEMTLKAVDVLDKRHRKDGWFLMSEAASIDKQMHTLDYDRSLGDLLELDDTVRATIEKLEELGELEDTLIIVTADHGHGFDVTGSVDTEYMEAQTDDRSKRNAVGYYENSGLSQYTVAGSNALRYSEGVHFPAQWDPRYTLHSGVGGFPDHREDYRVNSEGPRTPAVEDEKKGYVANYKDAVTGFLVNGNMPLDQGQGVHSLTDVPVFARGPCQELFGGVYNSIDIFFHMAECLGLSETKRAGQPPHAGKRD

SEQ ID NO: 45 - protein, 471 aa, Penicillium chrysogenum
MISYTQLFASVCALASTAAALTPLEVSGKDFVDSKTQDRFQIIGVDYQPGGAAGFTKKLDPLSDADVCLRDAALMQRLGINTIRVYNLEPSLNHDECASIFNAAGIYMILDVSNPLAGGYLDRSAPWTTYSAIYYKQVFGVIEGFKNYDNVLGFFAGNEVINEDAHYLVPKYVRAIVRDMKDYIAKNSKRAIPVGYSAADIREILMDTAHYFECDLKNSTSSRSDFFGLNSYSWCGESSYKKSGFDVLTEDFTNATVPVFFSEYGCNEVQPRVFTEVQALYGEEMTQAFSGGLVYEWTQEDNDYGLVKVNNSNTVTTLVDYDNFEKQVNKLDMERITSSNVTQTSVKPEACSASLIKDKSFYNAWDLPEVPSKVADYIKNGLPDAPSGKFVSVSSTTIPQKVYDHTGKEITDVKFEVKSGVNTPSSSGSGSSGTSDSSSSETSTNAGSPNGAPSLALGGAGGLFMLLASLL

SEQ ID NO: 46 - protein, 385 aa, Penicillium chrysogenum
MSAQALHNTLLIPGPIEFDDAVLQSMSHYAESHVAPGFVKVFGETLTLVRKLFQSTNPTAQPFIIAGSGTLGWDLVSANLIERGENALVLNTGYFGDSFGQCLETYGANVTHLKAPIGDRTPLEQVEQALKEKPYKLITLTHVDTSTGVLGDVKGVAQLVRRVSPNTLVVVDGVCSVGSEEIAFDEWDLDAVVTASQKAIGCPPGLSIVMTSGRAIQAAQSRKTPPGAYYASIANWLPIMQNYENNKPSYFATPPTQLVHALHTTLTQITADVPGRFAIHTEVSDKVKAAVAELGLKQVASYPECQAHGMTAMYLPEGLVPADVLPGLLKRGVIFAAGLHKEIATKYIRFGHMGVTVTDPKRGDVDKALAALKEALAEAKQAKGL

SEQ ID NO: 47 - protein, 1068 aa, Penicillium chrysogenum
MFSYTSRSLIGVSKRLWAPVPFRSLSSPTQPTPPEQEKTPVQDPTPTPTPVTPAEAATVAPTSATPIATPTATPATAPASTAPVASTEAEQVTEPSVKEWSERLGAFEDSRLPRSVQAIYLRPLRRKAEYGLPVCDLQLRSYSVRNVEFFADFAIRAAYYLNLPVSGPVPLPRIVERWTVPRSNFVHKKSQENFERITLRRLVQIKDGNPQAVQAWLAFLRKHAFYGVGMKANVWEHDSLDAGKAMDASVAEVEEALRPELARFGQRKDNSAPGTIFDTLNIPQDPAQLKRWRKEAFATLLAVGLDPKRSTIFYQSDVPAHAELMWILSTVASMGYLSRMTQWKSKLQLPEDTSLDDSTARAQLRLGLFSYPVLQAADILVHRATHVPVGEDQRQHLEFSRYTANSFNHLYGPIFPIPEALISPAKRVMSLKEPTSKMSKSHADEKSRIILTDSPAEIRKKVKVALTDSEAGITYDPICRPGVSNLIEILSHLEGVSCEDIVADFHSASLRSLKEHVADRIAYHLQETRDRYIMIMEDKTGYLESVAEEGAETARANSRVTMQQIRDAMVPEEKQPISHFQAEFGEDAIMKHAWILLVGLVPAWGLTLHRRDNPAVVQMDIQRKDVLDPITRDRRRKRSTVRQPLDNEVHDNSIYTYLPAYLGTPEQKVRLVLDTGSSDLWCNTPNSTLCESSENACASGTYDSSSSSSYLFVSSDFNISYADGSGAAGDYVTDTLTIGGTTIKDFQFGIGFSSGSPEGVLGIGYTANEVQVGRNGESAYANLPQAMVNKGVIKSNAYSLWLNDLDANTGSILFGGVNTKKYHGALQTVPIQKVGGRYSEFIIALTEVSLTTSSGQNTYSSSSIPAGVLLDSGSSLTYLPDALVQEIYDDLGVSYESDSGIGYVECSMAEQSITLSYTFSSPTINVGIDEMIIDVGDLYFRNGKRACIFGIVPAGTSTAVLGDTFLRSAYVVYDLENNEISLASTNFNSTENDILEIGTGTDSVPGATAVSNPVTTAPVGGTAARIGGPHGGSDLSGSATVNMAIPKATAMPRHMAVGLAGVGALLAL

SEQ ID NO: 48 - protein, 535 aa, Penicillium chrysogenum
MPFLWCGSRQKGQKWKQIEEAAANLQQLPSWTAPDNSLILQTFEWHVPADRQHWRRLQNALPEYKAIGVDQIWIPPGCKGMDAHGNGYDIYDLYDLGEFDQKGAVPTKWGTKRELEDLMCQAQGLGIGVIWDAVLNHKAGADYPEPFQAVKVDPKRRDLNVSKPTEVNGWTGFDFAGRGDMYSSMKYHWQHFSGVDWDDKSKQNAIYKIVASNKDWAQDVSTENGNYDYLMFADLDLAHPEVRADLLQWGTWITKSLSLNGMRLDAAKHFSTEFQRAFVQYVRKTANPDFFAIGEYWTGHLPSLLDYLKKVEYDLVAYDVPLLERFSKLSHAQAADLRGIFRDTLVQCRPDHAVTLVSNHDTQPGQMLETPVSQPFKLLAYALVLLRKDGQPCVFWGDLYGIRANVDNPMTPSCNGLLPVLTQARKLYAYGEQQDYFNQPNCIGFVRYGNARHLSGLACVISNAGHGSQRMFVGQHHASEQWIDILHPSMKPVIIDKKGYGNFGVQAMSASVWVDSATVDRDGLKRDFNVNIYDT

SEQ ID NO: 49 - protein, 396 aa, Penicillium chrysogenum
MVVFSKVTASLACFSAVVSAAAVPVKSPRQGFSVNQVQKTVTGTRTVNLPGVYANALAKYGATVPANVHAAAVSGSAITTPEENDVEYLTPVKIGESTLNLDFDTGSADLWVFSTELSSAEQSGHDVYDVSSSGKKLTGASWSISYGDGSGASGDVYKDTVTVGGVKATGQAVEAAKKISQQFVQDKSNDGLLGLAFSSINTVSPKPQTTFFDTVKSDLDKPLFAVTLKHGAPGTYDFGYIDKKKFTGSLTYTDVDNSQGFWSFTADSYKVGTGSAGPSIEGIADTGTTLLLLDDGVVSDYYKKVDGAKNNYSAGGYVFPCDADLPDFTVTIGSYDAVVPGKHIKYAPVTTGSSSCFGGIQSNSGIGFSIFGDIFLKSQYVVFDAEGPRLGFAAQA

SEQ ID NO: 50 - protein, 564 aa, Penicillium chrysogenum
MLAKSSLVLLALLRSTVAKDCTLNDFNATVGGRVQNLTPFSLPCFSSYNGNPVARDNAACAAIQENYSDPWMRTNSPNGYMNNQDEMWASDPNDQCLLDSSNPMDPLAFVNTTCRQGNLPSHYLEVQSEKDVIAAFRFSNCSGKKLAIKNSGHDYLTRSSGRDTLSLWTRNLRSMHYSADFAPSGSKSTARRYKAITVGAGVNFDEAYELAQKHNVTILGGYSSTVGVSGGWVQNGGHSILSPVYGLGVDRVLEFKVVTPDGVYRTANEFQNPDLFWALRGGGGGTFGVVLESTHRVEPAIRFVAANIKFPGNSTNMLPFMDIVVNNTLKWGQEGWGGHITGNTLVNVSPFLSIKQAKVSLASVIAYAKANGGSATIEEFTSWYPFYEKYVKTSSVAVGVTRFPGSRLIPRSIFKTAKGRKNLMDYFATIQSLGQTPYIPVVGPVLYNYTEGSTSASPAWREAIWELGSGASWAWNATLPTRKQKIQSIQNMTAVIEGITPGSGAYSNEANPFTTNWVEAWWGDNYEKLVSIKNKYDPKGLLSCWKCVGWKDSQVADSPFAALV

SEQ ID NO: 51 - protein, 616 aa, Penicillium chrysogenum
TRLVSGGSLSDIEHVVIFMQENRSWDTYFGTMPGVRGFNDPNVQVNSDGNSVWHQLVEPAQSNKTKTLLPWYLGYQGGDWHDAIQCMVAGSNGYEENQQSLNNGLNNHWVTRNTPWSWGYLKRQDIPVQFAIAEGWTSGDMYQESQITATNPNRVTLVSGSINVPGSPQDKDQGGVYIDNNEVPGCDDHGINCYPLKWKTVYDFYEEAGVSWQLFQDTNNFDDNPLAWFQQFQTASKNSPLAKKGMSFVGLDSFYQAAANGTLPEVSFIVGPSELSEHPPYMPKDGAWLQKKIVDAVTSSPKYNSTLLMISFDETGGFGDHVTPFHSPKNTPGEWMQDPLGMFSDIFVGPGFRVPFYMISPWTRGNRVFTERADHNSQILFVEEWLTARGYKNITTDQMVSWRRKHMSNLVNALNLDHPDYSLPDLPDAGILDTNEKGEYTGTSNCQARHKQTRPDVPYGEQSNATDVNTLWFEEGFKEVVGYLTEGRYLVFEKNGAAITNPARGNSLVTSDTSPQHNNKSQRWVIHYNDDEESHTFTISSALDGRWIGPDGALLPKSQSANAAQVHFTFLGGGLGYTLQFVEKGVYIDIDKHGDLNAEGTKPTSGYKVFSVSFRD

SEQ ID NO: 52 - protein, 550 aa, Penicillium chrysogenum
MLSRSIQSSRISFRASSSVTRSSVGQIRPGRLTNRTLATINSPRFTPADPIATNSRLSTISRHFSSSASENQQSSNMAPVETQQYDYIVLGGGSGGSGSARRAAGWYGKKTLIVESGRSGGTCVNVGCVPKKMTWNFATINEMLHIGKSYGYDIPDNVAMNYTHFKNTRDAVIKRLNGAYERNWGREGIDLVHGRAGFVEPHTIEVQLADGSGTARYTAPHILLATGGRPNIPSVPGAEHGITSDGFFELEELPPKIAVVGAGYIAVELAGVMNAVDVETHMFIRGENFLRKFDPMIQKTMTDRYAAAGVKLHRGHGGFKEVQLIRDGKGKDRLLKLIGHDGTELEVNELLWAVGRAPEVEDLHLDIPGVKLNAGGHVVVDEYQNTSAAGVYALGDVTGQAELTPVAIAAGRQLGSRLFGPPELKHSKISYENIPTVVFSHPEVGCVGLTEPEARQRYGDDKIKVYHTKFTAMFYDVGLSPEEKAKNPTEMKIICAGPHEKVVGLHILGLGVGEMLQGFGVAIKMGATKQDFDSCIAIHPTSAEELVTMR

SEQ ID NO: 53 - protein, 510 aa, Penicillium chrysogenum
MRISSLSLPLVLSLAGYATAYPYSGSEVILRRQSDKQAKADAVKEAFQHAWNGYVKYAFPHDELHPVSNGYGDSRNGWGASAVDALSTAIIMGNRDAVQKILDHIETIDFSKTNSEVSLFETTIRYLGGMLSGYDLLKGPAAKLAPKSSQVDALLAQSKKLGDVLKFAFDTPSGVPYNNLDISSKGNDGSSTNGLAVTGTLVLEWTRLSDLTGDDEYAKLSQKAESYLLNPQPSSGEPFPGLVGSNINISNGHFTDGAVSWNGGDDSFYEYLIKMYVYDPKRFESYKDRWVLAAESTIKHLQSHPDPRPEITWLASYYNGQQGLSSQHLTCFDGGSFILGGTVLDRQDFIDFGLELVDGCEATYNQTLTGIGPDSWGWDPKRVPSDQKDFYEKAGFYMENGSYNLRPEVIESFYYAYRVTGNEIYRDWVWNSFKAINATCRTDSGFAAVSNVNTAGGGAKYDNEESFLFAEVMKYAYLVHAEDAPWQVQKGQKNAFVFNTEAHPVRVAHT

SEQ ID NO: 54 - protein, 174 aa, Penicillium chrysogenum
MSGTETATVAAGCFWGVEHLYRKNFGNGKGLLDAKVGYCGGAVSSPSYQAVCSGTTGHAEALRIVFDPSIVTYRQLLEFFYRMHDPTTENRQGPDVGTQYRSAIFTHGDEQQKIAEEITDKVSKQWYKTPLSTKVLPAGQWWDAEEYHQLYLQNNPAGYECPAHFIRPFPPLAD

SEQ ID NO: 55 - protein, 880 aa, Penicillium chrysogenum
MCSSRRDTSGSTNVQGREVLPTNVKPQHYDLTLEPNFEKFTYEGTVTIDLDVTEDTDFITLNSNEIEIHSAIVSAKGSVVDSKPEISLKKDDQTATIKFGQAIAAGSDAQLKLTFTGILNDNMAGFYRSSYKENGETKYIASSQMEPTDARRAFPCFDEPALKAKFTVTLVADKSMTCLSNMDVDTETEIQGGAKKAVKFTTSPLMSTYLVAFIVGNLNYIETKNFRVPIRVYATPDQDIEHGRFSLELAAKTLAFYEKAFDSDFPLPKMDMVAVPDFSAGAMENWGLITYRIVDVLLDEKNSGASRKERIAETVQHELAHQWFGNLVTMDFWDGLWLNEGFATWMSWYSCNVFYPEWKVWQTYVIDNLQSALSLDSLRSSHPIEVPVKRADEINQIFDAISYSKGSSVLRMISKYLGEDVFLQGVRNYIKKHAYGNTETGDLWAALADASGKPVQSVMDIWTKNVGFPVISVTENKESSSIHVKQNRFLRTGDVRPEEDQTLFPVMLGLRTEKGIDEDTMLTERERDFPIPDLDFFKLNADHSAIFRTSYSPERLKKLGQAARDGRLSVEDRAGMIADSGALAASGYQRTSGMLSLLQGLDTESEFVVWNEILTRIGTLRAAWLFEDDKTKDALKAFQRALVAPKAHEIGWEFPENDDHILQQFKALMFGSAGMAEDPVVVKAALDMFARFSAGDLSAIHPNIRGSVFTIALKHGGLKEYEVVLDRSRHAPTSDEKTTALRCLGASEDPELIKRTLGLAMSEEVKSQDIYMPLGGLRSHPAGIEGRWNWLKSNWDELYKRLPPGLGMLGTVVQLTTASFCTDAQLKDVEDFFASKDTKGFDRAVEQSLDAIRAKINWLKRDRDDVEQWLSSNSYLQSKL

SEQ ID NO: 56 - protein, 319 aa, Penicillium chrysogenum
MDRSNKPSAIGVGASLPQPTLSIKDNVVEASLPTGQSVAVHLYGATVTSWKTGGQEQLFVSETAHLDGSKPIRGGIPVVFPVFGPPPQNHATSSLPQHGFARNSNWEFLGKSSSEAPGRDSDQTDLTVKLDFGLSHSMLTDEFRAAWPYEFGLVYSVTLTTNSLETALQVRNEGQQNFEFKVLMHTYLSIADISDIRVKGLESKTYVDKTLQGTSHTESSPALAITQETDRVYQQLDPAVPIVVASAKDDQPLFSIAREALTDVVVWNPWIEKAKGMADFGPDEAYKNMICVEAGSVSAWQTLEAGEAWEGGQSIKSRL

SEQ ID NO: 57 - protein, 529 aa, Penicillium chrysogenum
MNSLAIALLALGGGSAAMTVPTMSPISSSGAPGPTGLSYPSGFDLKSRWGNLSPYTDSTGFGIDKGFPAECELSQVHVLHRHGQRYPSSWPTDGGAMQSFADKVANYSKQNPDKKVGSGPLSFLNDWEYVLGNNLLLPSGAAAEATAGALFWSQYGRLLYRAGRGDAIYDPSMNVWPNGTARPKPTFRTTDYPRILESARWWLSGFFNNVGANSSYALYDLTVMSEDDGFNTTLSSTSTCTNGSSNGDPDVAGFYPTLTKTALKRFSAFLPHDFNLTTMDVYAMFSMCPYESATLGQSSFCSLFTEQEWEDFEYTIDMMFYGNNMFGSPSGRAQGIGYVEEVAARLQSRLIMQSHSSINYTYDNNTKQFPLHQPMYMDMSHETVIVAVLAALGLDYFKYGPHGMPKNVEHAVPRNFIMHKVAPFGARLFTEVWTCPADAKLDKLQDQMYKNPDLSSSSGTTDYIRFVLNNAPVPVEGLSPCKGSVNGFCGMKEFLDYVPELTKQAMYQQACFGDYNVSTQVPNGQPPLS

SEQ ID NO: 58 - protein, 461 aa, Penicillium chrysogenum
MKFQLIVTLLPVVLPLAHGAPARRDTPNPGLRGTDSLVGYSPDNSGGSDSRPDIKYTLLPEQKVDAEIGSYLDFVKADNPQPIRGSTGSDDPGPRNYYYDRINSDKLAPPGTDHGQTINAQWPMGLSHNRLGIDGAGWARQENTNVMPDATLMAGVDMRLAPAGYRELHWHVAGEWSLVLNGSCRIQAVNENGETFIDDVTAGDVWFFPPGLPHSIQALDDGVEFLLVFDDGDFSEDNTFLATEVFLHTPREVLSKNFGVEVSAFDKIPDDELYIFKGTPAPADIEKQNVTTAAGLVPRAKSYSYHFSEQPAHEVAGGSVKIVDPLTFPIASNFSAAIVTVHPGGMREIHWHPTSDEWTFFISGQGRATLFTAPDSATTFDYRGGDVGYFPKSNSHYIENTGDEDLVFVEVLQAPEFTDMALGQWIASTPKQIVSDTLNLSDDMLNNLKTEKQYVVSGTSS

SEQ ID NO: 59 - protein, 683 aa, Penicillium chrysogenum
MRFGLSVTQIAGASLIAGHFASALSPRTEIGDSYDFVIVGGGQAGLVLGARLSEDKNHTVLVLESGGNGDEYRTRIDTPAYSYFDSLWTTPLNWDFYTVAQPNADDREINWPRGKVLGGSSAINGLYMTRPGEDEVNAWKDMLGDMDGADNWSWESFYAALKKSEAFTPPTDDVIGEAGIVWNASHHGTDGPIHTTYPDYTFPEVGDWLASLQSMGIDTSASMYGGENLGADVSTSCINPSNWTRSYSRSGYLDPLPDRGNYDVLANAHVTRLVFDNSTSSEKKTASAVEYTTDSGSTKLQVKVNKEVILAGGTIGSPAVLLYSGVGPKDVLLEAGVDLVSELPGVGQHLQDHFSATVKWSTNVDTAGSIYYSGGNDKNDPKFLTYIDDAVAYVDASTIYGSKVDEHQTEFLASIDKYAPKTTYDDGVLAGYKAICNTTASKIFNSPTGQIEILFMNSDANGDIGITAALQHPLSHGRIYINSSNPMDFPVIDPNYFDNPADSEILLAGIKLARQLGETSPMSKSLTSETSPGPTVQSDEDWIAWLRKEASTEFHPSSSCAMLPEEQGGVVDANLRVYGLTNVRVADASIVPISLSTHLMSSTYGVAEQASDIIRRYYNLPAEPEPAFSGSTSAPSSSAAAAKKSGTPKSNASPARNGGAMSLMWTSLILVFVHAVVGFGLYI

SEQ ID NO: 60 - protein, 488 aa, Penicillium chrysogenum
MLPSILPLLLLSVLAEAAPGKRATAASAYCSNSDGNYKLSSIAPPVQGSGSPGSGSTWKLSIDDTSSGHKQTIVGFGAAVTDATVTSFNTLSSSTLQQLLNELMTGAGAGFALMRHTIGASDLSGDPSYTYDDNGNSADTSLSSFNLGDRGNAMATMLAKMKSLQSSLKILGSPWSAPGWMKLNGVIDRTTKDNNLNDGYLTRGGTGSTGYASAFAQYFVKYIQAYEDLGAHIDAITIQNEPLHSQAGYPTMYMFDYESAQLIQNYVGPALAQAGMNTDIWAYDHNTDMPSYPQNVINVAGQYVDSVAWHCYAANVDWTVLTQFHETNPNIKQYMTECWTPASASWNQAADFTMGPLQNWASGVMAWTLGTNDQDGPHLSSGGCANCRGLVTIANGGYTFNPAYYMMAQFSKFMPPGAIVLSGTGSYTYSNGGGVQSVASLNPDGTRTVVVENTFSNDIYITLSTNSGQEWSGNIPSQSVTTWVLPAA

SEQ ID NO: 61 - protein, 529 aa, Penicillium chrysogenum
MASTLSFKIYKNALLLAAFLGAAQAQQVGTSTAEVHPSLTWQKCTAGGSCTSQSGKVVIDSNWRWVHNTGGYTNCYTGNDWDRTLCPDDVTCATNCALDGADYKGTYGVTASGSSLRLNFVTQASQKNIGSRLYLMADDSKYEMFQLLNQEFTFDVDVSNLPCGLNGALYFVAMDEDGGMARYPTNKAGAKYGTGYCDAQCPRDLKFINGQANVEGWEPSSSDVNGGTGNYGSCCAEMDIWEANSISTAFTPHPCDDPAQTRCTGDSCGGTYSSDRYGGTCDPDGCDFNPYRMGNQSFYGPSKIVDTESPFTVVTQFITNDGTSTGTLSEIKRFYVQNGKVIPQSVSTISAVTGNSITDSFCSAQKTAFKDTDVFAKHGGMAGMGAGLAEGMVLVMSLWDDHAANMLWLDSTYPTSASSTTPGAARGSCDISSGEPSDVEANHSNAYVVYSNIKVGPLGSTFGSTDSGSGTTTTKVTTTTATKTTTTTGPSTTGAAHYAQCGGQNWTGPTTCASPYTCQKQGDYYSQCL

SEQ ID NO: 62 - protein, 687 aa, Penicillium chrysogenum
MQLYRLGLLVASFVSSIGAQSTFSPARPPAIPLAVRSPYLSTWLNVGKDGGNGGYLAGQWPVFWENQVNGWTGMIRVDGNTYTWMGLPGSKTVNQTAFEYTSTKSIFTMNVENKLEMNITFLSPVTPTDLKRQSLVFSYLNVEVSSLDGQKHDVQVYTDISAEWVSGDRNAIAEWEYGTTDGVAYHKVHRQTQLAFTEKSQQGEWGNWYWATDDSKDMTHQSGADTDVRGQFATTGKLSNGDDTNFRAISSVWPVFGFSYDLGSVDSSPVSTLFSLGLTQDEAIQYEGASQYAPVPSLWKSYFATELAALSFFHKDYTESSNLASSLDRRVAQDSIATAGQDYLVVTSLSVRQAFGATQLCGTQDKMYMFLKEISSNGNMNTVDVIFPAYPIFLYTNPELLKLVLTPLLENQEAGKYPNDYSIHDLGSSYPNATGHSDGSDEKMPLEECGNMLIMSLAYVQKSGDSDFLNDHYSLLKQWTSYLVEDSLYPANQISTDDFAGPLANQTNLALKGMIGIQAMAVIANMTGHTADAADYSRIAKDYITQWQDLAIAKGANPPRTTLSYGDTASHGLLYNLFADAQLGLNLVPQSVYQMQSDFYPTVANKYGVPLDTRHTYTKGDWECFAAAVSSVDTRDMFINDLATWINETPTNRALTDLYDTISGDYPQNTFVARPVMGGCFAPILVR

SEQ ID NO: 63 - protein, 226 aa, Penicillium chrysogenum
MADHHDDELAATTTEGFKVGEKKTLDEYNQLGMLIQFQFIGNIQPSVISQLTIFLSPAIDKDDEAMNRWKASLGLNSGDPIADPNDPRKCIIKSLALQVDGREDVVIDLSSPGSVDSLKDKPFKIKEGSKFHIKVTFQVHHEVLSGLKYLQVVKRKGIRVSKDEEMLGSYAPNTTSKVDYSKEFNEEEAPSGMIARGHYNAVSKFIDDDQNTHLLFEWSFDIAKDW

SEQ ID NO: 64 - protein, 206 aa, Penicillium chrysogenum
MGISRAALLLAFAIQPFLSGALPTPSPPGVPSASTATSELEGLTVAAQGSQDGYSREEFPHWITVDGCTTRETVLKRDGTDVVQSSSCGATSGSWLSPYDGETWTAASDVDIDHLVPLSNAWKSGASSWTKAERQAFANDLENPQLLAVTDNVNASKGDKGPEDWKPPLASYYCTYAKMWVKVKSVYDLTITSDEKAALVEMLDTC

SEQ ID NO: 65 - protein, 399 aa, Penicillium chrysogenum
MSEMRSVAYFVNWAIYGRNYNPQDLPAHKLTHILYAFANVRPENGEVYLTDSWSDVEKHYPTDSWNDVGDNVYGCAKQLFLLKKQNRKMKVLLSIGGWTYSANFAQPASSEEGRTTFAESATRLVLDLGFDGLDIDWEYPKDDTEAQNLVLLLQKCREVLDREAGPDRHFYLTIACPAGASNYEKLKFQEMTPVLDFYNLMAYDFAGSWDTNAGHQANIAPSDSNPASTPFSINAALDYYINDGGVPPAKIVMGMPLYGRAFEDTDGPGAPFSGVGEGSWENGVWDYKALPRPGAEEQFDEESGASFCYDGGARTMVSYDTAHMAQVKANYIRDRGLGGGMWWESSGDKGGKEADPAEGSLIGIFVDGVGGEGALDQSANALEYPESKYDNVKAGFPDE

SEQ ID NO: 66 - protein, 347 aa, Penicillium chrysogenum
MKIFSVFTAFSAILSCTAVVSAQSDPDPIGTIYDGHVPANLYGSSYPYTWPVKLFNFYNQRQNLTMAFMDIPARKHNKHKKTAVLLHGGNFCGVTWSDTARQLSAAGYRVILPDDIGFCKSSKPQGYSYNVQQQALNIHSLLTALGIDQVTVIGHSMGGMIAARYGLMYPNNVQQLFLVNPLGLEDWVAKGVPYLSVDASYESGVVSNFTTLKAYEHANYFPNAPWKPEYDAWVHMLADIYAGDYGSEYSYVMALVTDALLSQPVIYQLPLLQTRTYLLVGDSDVSALGKAWSSPAVAAKLGHYHELGPAAAAMIPNCKLHMFPGLGHAPFLQDPKAFYDVLLSWLD

SEQ ID NO: 67 - protein, 649 aa, Penicillium chrysogenum
MISNILTFSLLAGSALAVPVESDIEKRIDCPSVHIFGARETSVSPGYGSSSTVVNGLLSAYSGSTAEAISYPACGGQSSCGGVSYSNSVAQGIAAVASAVNSYNKQCPSTKLVLVGYSQGGEIIDAALCGGGVPNQGYTNTAVQLSTSAVNMVKAAIFMGDPLYVAGLPYNVGTCAAGGFDARPSGFSCPSASKIQSYCDAPDPYCCNGSNGATHQGYGAEYGAQAIAFVKNSYPTKSSKLPPFPMATHIPNLNTLRRGRGRGRGIGRTEETGFPSGKDRIVQGTDNDASVSRLSAVELGYLEDAYAAALTPPGSATRRLPIINRGEPVADWDTSRAPGTYARTTAIDQLVARFLGPSSPENTHKKQIISLGAGSDTRVFRLLSSRQTPDFVYHELDFAVNTAEKIRAIRSAPVLQNALGIDSSRVSLEKDTRVTVSEAGDALHSPSYHVHPVDLRSLSTCSDPTAALPGVETGLPTLLISECCLIYLSPAEAEQVVAFFTQRLFGHGRVVPGTGDGLPEAQVNVAPLGLVLYEPIRPNDAFGRTMVSNLAARGIQLKTLSRYASLAAQRDRFQDQGFGDGQAAADIEFIWKRWVNEDEKERVAGLEMLDEMEEWQLLAQHYCIAWGWRDRDDIAAFAGWKDLEGQQGE

SEQ ID NO: 68 - protein, 948 aa, Penicillium chrysogenum
MAFLQTSIAIFVAHIILLLGLPASLVAAVPVNVPVSPVNNVLATTQKTSAASSYWVANVERQGVVPFGKSADYKIFRNVKDYGATGDGSTDDTAAINKAISSGGRCGKGCDSSTTTPAIVYFPPGTYVVSKPIVQYYYTQIVGDAVELPIIKASAKFAGMAVIDADPYEDDGSNWYTNQNNFFRAIRNLVIDLTSVPAGAGAGIHWQVGQATSLQNIRFEMVKGGGEANKQQGIFMDNGSGGFMADLTFNGGNYGMFLGNQQFTTRNLVFNDCQTAIFMNWNWAWTFKSVKINNCEVGLNMSTSPTNQTVGSVLMLDSKLTNTPTGIVTAWTQKSIPVGGGSLILDNVDFSGSKAAVAGVDGNVILEGGSVVDHWIQGNTYTPSKTVNKRSEAQPELVTVVETVTETILACPASHGLPSASLAGSDVPAPAKTASHGSAPAPSPAPGAGTSSDADRSAESSVVDEVPEPTPVAAPSTEAPVTSAVPVGSSPSSVVSAKEPVASVTSTAASAESTSSGSEVSEGRQSGSDSSTGTCGAPGAVASARTQSTLKTADKPASLLKGGAIFERSKPLYEDVAASSFISVKSAGAKGDGTTDDTEAIQKIFNSYKDGQIIYFDHGAYVITSTIKVPKNIKVVGEIWPMLMAHGKTFADQENPVPVFQVGEKGDTGSVEMSDLIITTKGPAPGAILMEWNVAGTSQGSAGMWDVHFRIGGAAGTELQSDTCPKTPKQKTTPKKECMAAFMLLHITKKGSAYLENTWFWTADHELDLKDHNQINVYTARGVLIESENANWLWGTSSEHHQLYNYQISGAKNVFMGLIQTETPYYQSNPTALVPFTPQKSWNDPDFSNCKTNSCRKAWGLRVLGSSDVFVYGAGLYSFFENYTQSCLNSEDCQENMVEVDCSDVKLYGLSTKAAVNMVTSSSGKGLVPQKPNKSNFCSTIALFEQHA

SEQ ID NO: 69 - protein, 798 aa, Penicillium chrysogenum
MYYSSVLKYLFLLACANAQLLEIPAVDAIVSSAMLPFEQYMSFGAPTKIASAAVSFETKVAANAKSSVAVAAAADTPYWLADIAHQGVAAFNPNPSSYKVFRNVKDYGAKGDGVTDDTAAINAAISAGGRFGPASRQSSTTTPAIVYFPSGTYLISTSIIDYYFTQLIGNPNAMPVIKATAGFVGLGMIDGDQYQSDGNQGWTSTNVFFRQIRNLKLDLTAIPAATAATGIHWPTGQASSIENVVIVMSSASGTQHQGIFIENGSGGWMTDVVITGGVYGANIGNQQFTMRNLVISNAVTAISQIWNWGNGGAGNQLVGSVNILDSTIQNCPTFVDTAWQSSTLSTGSLIMENINLKNVPVAVNGVSGTVLAGSTGSTTIGAWGQGHKYTPNGPTNFQGSFTAPTRPSALLAGGSNRYFTKSKPQYAQSPVASFVSIRSAGAKGDGSTDDTTVIQSTLASAASAGKIVFFDQGTYKVTNTIYIPPGSRIVGEAYSVIMATGSVWSSITKPVPVVQIGRSGESGSIEWSDMIVSTSGSAPGAVLIEWNLAATSGSGMWDVHTRIGGFQGSQQQVAQCPTTAAVSAACQVAYMSMHITKTASGVYLENVWLWTADHDLESPTNTQISVYSGRGLLVEGKNIWLYGTGSEHHSLYQYQFSDASSICAGFVQTETPYYQPNPNAANGPYTRNLALSDPDYSSCLGGNCNSLGLRILNTKDVIIYGAGLYSFFNNYSTSCSTFPLPENCQSMIFSTEGSTSGLVVYGLNTVGTSYMIVKDGTALATVGDNLATYAATIAYFTF

SEQ ID NO: 70 - protein, 718 aa, Penicillium chrysogenum
MTIRNMKFTPEVLLGAPRRSSAVPNAAGTLAVYTQTSYSFESHSKTNEIRIFDTSSGRSALITNDPGASNPQWVADSDKLVWLKTKGNGNTSFVIGDARQADETYTAGTVPGPISDLKVVSLEPGKVGFAVTGKANTDGSLYNPHDAKKPHTTGKLYTSLFVRHWDSYVEPQKNAIFYGLLEQAPLSPARRQAGKYSISGLTNLIAVSGLAGVESPIPPFGGTGDFDISPSAIVFIAKDPNLNPATHTSCSCYYAPMFSWTSMSVSEPKICKVTGLQGAMSSPVLSSDGSSIAVLAMREDGYESDKNRILYVPNPWNGDMIEIFQSDDGEGLWDLSPSAVSFAYDDKSLLLHVEEVGRGVLYQLPLENVNTIKPDSLKRLTRSGYVNDAVPAAAKSPKLFVSSSSLVDNSLWTIIDPAYPETVQLVSSNGRGGNAFGLSPSQVDEIWFKGAEDHPVHAWVVKPSDFKPGSKYPLAYLIHGGPQGAWNDQWSTRWNPAVFAEQGYVVIAPNPTGSTGYGQPFTDGIQGQWGGRPYEDLVRGFDYIEHHLDYVDITRAVALGASYGGYMMNWIQGNLLGRKFKALVTHDGVFSMTSQLASEEQYFPLHDLKGPIWKVPENWAKWDPSRFTEHWQTPHLIIHNELDYRLTIAEGLAAFNVLQMRGIDSAFLTFPDENHWVLNPENSLMWHRTVLNWINKYVGLPAVSEEPDLARGVGSLSL

SEQ ID NO: 71 - protein, 367 aa, Penicillium chrysogenum
MIGFYQSFLVITFGVLVSAANFSLFGITIDIPLPERPCGNHNRDVRKEWGELKRAERVDYTNAVLCMQGKPQHLPREEYPGVRNRFDDFVATHINYTLNVHLSGLFLPWHRHFLWLWEKALREECDYPGHLPYWNWPLWSENLKASPLFDCSDSSLSGDGEYNPGEQSLSGGAVTIPRGTGGGCVRCGPFKDMQIHMGPFDRNIVSFAKLPAPGFDYNPRCLNRSLNNFVSSNYDNETIVDRLLAAPNMSDFQTIMDYWPARPKGVLGVHGGGHFSLGATLQDLFTSPQDPAFMLHHGMIDRLWSMWQAKDEDHRRFALNGTNMLLNPPNATLVTVDMEMEFGVLDRPRSVGEVMDPTRYGYCYSYS

SEQ ID NO: 72 - protein, 458 aa, Penicillium chrysogenum
MKSSVASMATAITMGASTVLGAATNLKARESDITPITVKGNAFFKGDERFYMRGVDYQPGGSSDLADPIADVEGCKRDIKNFKELGLNTIRVYSVDNSKDHDECMNALAEAGIYLVLDVNTPKYSLNRAEPEMSYNDVYLQYIFATMEKFAKYDNTLAFFSGNEVINDGPSSKAAPYVKAVTRDMRTFLRARKLREVPVGYSAADVDTNRLEMAEYMNCGTDDERSDFFAFNDYSWCDPSSFTTSGWDQKVKNFTGYGLPLFLSEYGCNTNKREWQEVKALYSTKMTPVYSGGLVYEYSEAGNDYGLAKIDGDKVTTNKDYDALKKAFEATENPSGNGGYNSTGGASGCPKMQKPNWDVDSDSLPAMPKPAKKYLTEGAGKGDGFAGKGSQNAGTKSSGTATQGSGEVSSATGGSAASGTSSEGAAASLKPFQFSFAPVTVGLVTVVSTVFGASFVLL

SEQ ID NO: 73 - protein, 613 aa, Penicillium chrysogenum
MGAVDTSERLSKLRQLMQQHKVDVYIVPSEDSHQSEYIAPCDARREFISGFSGSAGTAIISLSKAALSTDGRYFNQAAKQLDNNWQLLKGGVEGVPTWQEWTTEEAQGGKAVGVDPSLITASGARKLAETLKKNGSSLVGVRENLVDLVWGKERPARPSEKVRVHPEKYAGKTFQEKVAELRKELESKKKAGFVISMLDEIAWLFNLRGTDIPYNPVFFSYAVITPTTAEIYVEDDKLTPEVKAHLGQDVVVKPYESIFADAQALSTKSQSAGENAAKFLLSNKASWALSLSLGGEGQVEEARSPVADAKAIKNETELEGMRACHIRDGAALTEYFAWLENELINKKTVLDEVDGADKLEQIRSKHDLFAGLSFDTISSTGPNGAVIHYKPEKGSCAIIDPNAIYLCDSGCQYFDGTTDTTRTFHFGVPTEFEKRAFTLVLKGTIGIDMAVFPKGTSGFAIDVLARQHLWKEGLDFLHGTGHGVGSYLNVHEGPIGIGTRVQYTEVPIAAGNVISDEPGYYEDGKFGIRIENIVMAREVKTAHNFGDKQWLGFEHVTMTPIGRNLIEPSLLSDAELKWVNDYHAEIWAKTEHFFREDNLTRSWLERETQPISK

SEQ ID NO: 74 - protein, 316 aa, Penicillium chrysogenum
MRVSGLVSLVLAATPALVSAKGTLGFSLGNKNPDGTCKSTSDYEADFDALKDMSTIVRTYSGTECKTPENILPAAKNKGFKVVLGMWVGKPTDTKNLLEEPSFKKDWAAIQKAIPGYGDVIHAITVGSETLYRGDLTGPQLHTYISHVMDNVPKGVLVGTAESWNKLADGTGDALFTQEPVVKYVLANAFAYWQGTAADKAYQTYFDDMVGAMEHIQKIAGDNADKINIVTGETGWPTDGGSDYEDAKAGTKNAEKFWKTGICGMLDWGVDLFYFEAFDESWKPDTKGDNGEMKDEQHWGLFTAERKIKFDATCPK

SEQ ID NO: 75 - protein, 225 aa, Penicillium chrysogenum
MKINALPLLFATAASASVQGFDISGYQPKVDFAGAYAAGARFVMIKATEGTSFISSSFSSQYQGATSAGLIRGGYHFAHPDSSTGAAQAKYFIAHGGGWSDDGLTLPGMLDIEYNPSGASCYGLSHSAMVSWIKDFGETYKSAAGRYPMIYTTADWWNTCTGGSTAFSQDYPLVLARYSTSVGTIPGGWPFQSFWQNSDAYSFGGDSEIWNGSEASLKTFAKTAA

SEQ ID NO: 76 - protein, 417 aa, Penicillium chrysogenum
MHFKSYVTAALYGLPALANAVPSPSHSQAAPSPSAAGSDADHFKSYTIKAENITAKLIPYGARLTSLLVPDRDGNIQDVVVGYDDPKEYLHDSQTNRTFFGAVVGRYANRIKNGTFTIDDNEYHVPENENDGADTLHGGFTGYDMRNWTVTSHSDSSITFTLLDQGFEKFPGDVVTHATFSVSTEKSQSNPKGLPQLTAKLVALSLTEKTPIMLSNHIYWNLNAFKEANVLKDTTLQLPLSQRFIGGDSILIPNGTIHDVENTYQGALDFTSPKFIGKDIEKTYDLCGAGCTGYDTCFLVDRPSTYASDSMATVLSAESSSTGITLDVATNQAALQIYTCSGQNGSIATKKSQAKRNEANGGDAGATHVNKYGCFVIETEDWIDGINNPEWGRLPYQVFGPDDGPAVNWATYQFGTI

SEQ ID NO: 77 - protein, 347 aa, Penicillium chrysogenum
MPCYLKYAAAGLAAATLVSGQTFSDCNPMQKTCPANVGTTQSRQTFDFTKSSDLDQWTTTAGHVKTGSNGAEFTVNKQGDAPTIQSDFYIFFGEVSVTMKAAPGTGIVSSIVLESDDLDEIDWEAVGGDTTQIETNYFGKGDTTTYDRAIWEPVSTPQETFHTYKVVWTKETTTWSVDGKVIRTLSFNDAQSGTRYPQTPMNVRIGIWAGGDPSNARGTIECAGGETDYSNSPFTMYIKDVTIVNYNPAESYTWSGQSGSYESIEFTGSTGSTNSTSSTSSTTSKTTSASRSLIIAANTATPSSSGSASSRPNEPSASPVFNAASGLSAGGLGFMSFLAVVSGFLFL

SEQ ID NO: 78 - DNA, 3720 bp, Glycine max
tcacccatctacaagtgtctccgccgcttctgttttcacttttctgcattaacagagcatcaagaagcagaaacagagcacgatccctaaacagagcacgctcacattctcaccgcaaagtacaaaacctactccgaacatagccctgcaactgactgacacatcaccgtaatgggtctcaagcacgatcctttgcaacaacccaccaccaatcagttcaatgggggcaacaagttacctggtgaccattgtggtgattctggttttgaccaaagggtcctaactgctcccataaaatctgctgttgacaagttccagcttattcctgagttcctcaaggttaggggattggtgaagcaacatttggattcctttaactattttgtgaggacagatataaagaaaatcgttcgtgctaacaatcttatcatggcgagtaggtacccacacatatatctaaggtttttaaatgtcggaattggtaaaccatccatgatgattgatgaggttactgagggccttactccacaaacgtgccgcttaagtgacctgacgtatgcggctccaatatgtgctgatgttgagtacacgctacgaagtcacgataaaccagacaacaagagaacgctcagagttgaaattggaagaatgcctattatgctgcggagttgttgttgtgtcttgcatgggaaagatgaagctgaacttgctaaacttggtgagtgcccccttgatcccggaggatattttgtaatcaaagggactgagaaggtgattttgatacaagaacaactgtcaaagaatagaataattatagacaccgacaagaaaggaaacattactgcatctgttacaagcagcacggagaaaataaaaacaaaaactgttattgtgatggaaaatgagaagctctggttacaattgaataaatttcctaagaaggttcctcttatggtagttatgaaagctatggggatggagagtgatcaagaagttatacagatggttggaagagatcctcgttatagttttctactgttgccctctattgaggaatgtagaaaatgtaaggtatatacaaaagagcaagcattggagtaccttgataagctggtaaaacgtcccacttattcaagcaattcagctgaaaaggaaggagcagcattttctgccctaagagatgtatttcttgcaaatgtgcctgtggatcaagataattttcagaaaaaatgtatatatgttgctgttatgatgagacgcataatggatgcaattttaaataaagatgcaatggatgacaaggattatgtgggaaacaagcggttggagttatctggccagttaatatctctgctttttgaggatctctttaagtcaatgacaaccgaagttaagaacttgacagacaaaatgttagataagccggacaaggctaagaattttgacatatgtactcttcttactaggactcggagtatcatcactctaggtctggaaaggactctctccactggtaattttgaaattaaaaggttcagaatggaaaggaaaggaatgacacaggtgttacaaaggttatcatttattggtgctttgggccacatgacaagagtctcaccacagtttgagaagtccaggaaagtaagtggacctagagctttgcagcctagccagtggggcatgctttgtccttgtgatacccctgaaggtgagtcttgtggactagtaaagaacttggctttgatgactcatgttactactgatgaagaggagaagcccttgatttctctgttctattctttggatgttgcacgcatagaacacctctttgcagaggagcttcatacaccggattcctttcttgtcatttttaatggtttaatccttggcaagcataggaggccactgcattttgctactagaattagaaagttgcggagagcaggtgaaattggtgagtttgtgtctgtctatgtcaatgaaaagcagcattgtgtctacttagcttctgatggtggtagagtttgccgtcccctggtcattgctgacaagggaatatcaagaatcaaacagcatcatatgaaagaattaatggatggagtatgcacatttgatgattttttacgagatggcttgcttgagtatcttgatgttaatgaagaaaacaatgctttgattgctttatatgaaggagatgccacatcagaaactactcatattgagattgagccttttaccatcttgggagttattgcagggttaattccatatcctcatcataatcagtcacctagaaacacgtatcagtgtgccatgggtaagcaagctatgggaaatatagcatttaaccagctgcgccggatggacagtttgctttacctactggtttatcctcaacgacctttgcttacaactaagacaattgagctggttggatatgataagcttggagccggtcaaaatgccacagtagctgtaatgagctatagtggttatgatatagaagatgccattgtgatgaacaaggcatctcttgatcgtgggtttggtcgttgtattgttatgaagaagtataatgccatcattcagaagcattcgaatgacacatcagaccgaatacttaggcctaatagaactgcagacaccgctggacgtatgcagatacttgatgatgatggtattgctgctcctggggaaattcttaggccatatgacatctatatcaataaacaatcaccgattgatacacgtactccaaaaacaggatctgcagcaaatttgccagatagtgcatatcggtccaatgcacaatcattcaagggtaatggaggagaagtagttgatagggtggttctatgctcggataaggataataacatgtgtatcaaatttctaattcgtcacactcgtagacctgagcttggtgataagtttagcagcagacatgggcaaaaaggtgtttgcggaactattgtcccgcaagaagactttccgttttctgagaaaggcatttgtcctgatctgattatgaatcctcatggtttcccaagtcgaatgactgttggaaagatgatagagcttcttggggggaaagcaggggtttcatgtggtaggtttcattacggcagtgcttttggggagagaagtggtcatgctgacaaggttgaaaccataagtgaaactcttgtgagtaaaggcttcaactacagtgggaaagatttcatttattcaggtattacgggttgcccactgcaagcatatattttcatgggtccaatttactaccagaaattaaaacatatggtgcttgataagatgcatgctcgtggtagtggccctcgtgtcatgttaactagacagcctacagaagggagagctagaaatggaggtcttcgtgttggagaaatggaacgtgattgcttgattgcatatggtgctagtatgttaatttatgagcgactcatgttgtctagtgatccttttgaagttcaggtaataatctgaacttttatgttaatgtcacatgtctgcattcttgattgcatttcaacagtgtcactccaccatccaagtctgatttcaaaaaacccattattgaatggtttacaatattaacagaagaaattttttgtagacaactgggttccatatgttcatcctcttttttgcatatggtgtcactaagcacttcccatgaataatgatttaaatggaaaaggt

SEQ ID NO: 79 - DNA, 2035 bp, Glycine max
caaactgtgcaaaatgggaaggaaaatctcactggacagcgacaccgtacgacgattcatgggttcctctccgtcaacacccaaagccaaacaaacaaacattaaccttaaccaaacaaaccctaagttttgatctgcctctcattctttgttcccttctcatccattcctaaataaattctagataatttttttccgttatatttcctaaataaaattccccgattaaccatcgtgctacccacaaaatctaatcttcttcccatttttttctgagcatttagctgtcgcttccttttgtttgttttttgtcatcctcggcagatcaggttttgtttttgcttctgctccagctttggaggatccacagtttctctctgagtgggtggtttaatgtatattttgaagatactgatataagtatgggcagcagtgagatggataaaactccaaaagagaaggagtcaaagacgccgccaccaccacctacgtcacaggagcagtcttcgaccaccagcactggaacaattaatcctgagtggcctggctttcaggcatattctcctatacctccacatggtttcttggcatcaaatccccaggctcacccttatatgtggggtgtccagcagcaatttatgcctccctatggtactccaccacatccctatgttgcaatgtatccccctggtggcatttatgctcatccatccatgcctccgggatcttatccttttagtccttttgccatgccttctccaaatggcattgctgaggcatcaggaaacactcctggcagcatggaagctgatggtaaacctcctgaggtgaaggaaaaattgccaatcaaaagatcaaaaggaagtttgggtagtttgaatatgatcacagggaaaaataatgaacatggtaaaacaccagggacatctgctaatggaattcattcgaagagtggtgagagtgcaagtgaaggcgaaggtactagtgaaggaagtgatgccaattctcaaaatgactctcaattgaaatctgggggcaggcaggattcttttgaagatgaaccatctcaaaatggcagtttggcatatactgctcaaaatgggggactaaatacacctcatacagtagtcaatcaaactatgtctatcatacctatctctgcaggtggtgctcctggagctgttcctggtcccacgacaaacttaaatataggaatggattattggggtacaccagcttcatccaacattcctgcacttggcagaaaggttccatctactgcagttgctggagggatggttaccgttggatctcgggatagtgctcagtcacaactttggctacaggatgaaagagagcttaaaaggcaaaggcggaagcagtctaacagggaatctgctcgtaggtccaggttgcgaaagcaggctgagtgtgatgagttagctcagcgtgctgaggctttgaaggaagaaaatgcttctctccggtctgaagtaaatcgaatcaggagtgattatgagcagctagtctccgagaattcagctctcaaggagagactgggggaactacctgcgaatgatgatcatcacaggtcttgcaggaatgatcagcatgtgggtaatgacactcaacagagtgggcagacagaggccatgccgggcggtcagtagcaccaaccaaccactgcatgcctcttttcagagagataatctaacttaaatagcaagagcaagatcttgtttcggatagcttgtagttcaaattgtattaaagctgatcatttatagtcttaagatctgtttaatgttatatgatccttcattcctaatttgccttttattttcccactcattcaaaacaacctggattgttatgtagtgtgtgaattgtgtcataccttatcttcagctccaaagttagtgttcccattaagtaagcaatatagttaacggtgttgtccattatatcatttcatgtacaaatgatttatcaggaaaataaagaagagaaaatctctgatgctttgacaagcttt

SEQ ID NO: 80 - DNA, 2471 bp, Glycine max
taggctctactctcaacatcgatcttctcaaatagtctcatatatctgtcttcgattcttacaaataataacaataaaaaaaaaaatagtactgaacttcccacaccatagcctcaaacatgactcaagccaatggccaccgtcgtgttgatcaaacagtgattgacataaagaaaccgccggtgagcttcaccgggggtctggtgttcgagtgcctcacttacaccgttacaaagaagaagaaggttgaggagaagtggtcgaatcaagaggtggacctgctgcatgaaatcactagctatgcaccaaagggttgcatcactgcagtgatgggccctagtggcgcaggaaagtccactctcttggatggccttgctgggaggattgcgagtgggagcctcaaagggagggtctccttggatggggcaactgtgagtgcaagcttgatcaagagaacttctgcatatatcatgcaggaagataggcttttcccaatgctaactgtctatgagactttgatgtttgctgctgattttcgtcttggaccactttcacttgctgataagaagcagagggtggagaagctcattgaccagcttggcttaacgtcatctcgaaacacctacataggagacgaaggtacaagaggaatatccggcggagagcggcggcgggtctcaatcggcgtggacatcatccacggcccatccctcctcttcctggacgagccaacctcagggctagactccaccagcgcccacagcgtgatcgagaaagtgcacgacatcgctcgcggcggcagcaccgtgatcctcaccatccaccagccctcatcaagaatccaactcctcctcgaccacctaatcatcctcgcaagagggcaactcatgttccaaggctcaccccaggacgtggcactccacctgagtcgcatgccacgcaaaatccccaaaggagagagccccatcgagcttctcattgacgtgatccaagagtatgatcagtctgaggttggagttgaggcacttgctgagttcgcacgcactggtgtcaagccacctcctttgtctggccaacaacaacactctgtgtcttctgttgctccgtcctcgcaccttagccataggtatgaggaaaattctcaggacttgtcttactcgtcgcaagtgagtagaagggtcgttgatggttttgatcacagtctcagaagttcccataacaacaacacatcaatgtcgtggagcactgggaatagtgcggcgtttttgaaattcactccttcgcggcttaagaatgatcacaagctgcagaataccgcgagaaccaatgcttcacctggatactacgcacactggagtgaaatcctcgaagccactccaacaccccgtagcagtgactacacagtgaatgagaaggactacctcgctccctcaaacgccacacaggaacaccttggagcaaagtttgcaaattcctacctaggagagatttggatccttatgcgtcgcaacttcataaacataaggcgcacccctgagctcttcctttcaagactcatggttctcaccttcatgggcatcatgatggccaccatgttcttcaagccaaaagaaactttgcaaggaatcaccaaccgcctcagcttcttcatcttcacagtgtgccttttcttcttctcctctaacgacgccgtcccggccttcatccaagaaaggttcatcttcataagggaaacctctcacaacgcctatagagcttccacttacaccattgcaggcctaatcactcacatgccctttattcttctccaagcaactgcttatgccgtcattgtttggtttgccctaaaacttagaggcccttttctttacttcttgcttgttctcttcgtttctcttctttcaaccaattcatttgttgtgtttgtgagctcagtggttccaaactacatcttgggttatgctgtagttattgccttcactgccttgttcttcttgttctgtggatacttcttgaacagcaacgacattccccattattggcgttggatgaacaaaatttcgaccatgacgtacccttatgaggggctattgatgaaccagtaccagaccaatgatacctttgggtttgggtaacttgatggtgcacggattaccggtttagatatcttgaatagtctacatattgacactgatgaacgtaagaagaggacaattgtgcttacaatgtttggttgggctgtgctatatagggttttgttttacttggtccttcgttttgcatcaaaaaaccaaaggtcgtagtgaactatatatagtatatctaagggagagtgtgagttagttaaccatttgatttgttttgcactgcaaacattgctttacgctggaggagctgttaaatatgttgcttcattgtattgtattttgcatcaagctttataattgtataataaaacttgatggactttt

SEQ ID NO: 81 - DNA, 1993 bp, Glycine max
aagaatcctgtatttatcggcatgggtcatggtatagtgtcttttttattttcttttgttaacagaacgcagtgacgcacacaataagtcaataacacggtggtagtacacggagtcacggacttgcctattgggtagatacgccactcacgttttcttcctttagtttcgtggaaccatatgatgtctgtctgtccctttttctatttgacaacgttacgtggtgccgttccatgatttatgaactatgacccttctttgtctcgtaatcttgggttccaaaagaaggagaagatgaacgtggatctggaatcattggcagaggcaacttctggggccataggatcactgatcagcaccactattctctacccacttgacacctgcaagaccaagtaccaggctgaggctcgttcctcaggtcgaataaaatacaggaatctcactgatgtattattggaggcaatatctaaccgtcaggtgctttcactttaccagggccttggaacaaagaatcttcaatccttcatttcacaatttgtctacttctatggatacagctattttaaaaggctgtatctagaaaaaagcggttataaatccattggaacaaaagcaaacttggttattgctgctgctgctggggcttgcacagccattgcgactcagcccctggatacagcctcttcaaggatgcagacaagtgaatttggaaagtctaaagggctactgaagacccttacagaaggaacctggagtgatgcatttgatggcctcggtatttccttgctgctgacatcaaaccctgcaattcagtatacggtgtttgatcagctgaagcaacgagcactgaagaataaacaaaacaatgctgataaaggaacatctccagcatccctttccgcatttatggcctttcttttaggtgcaatttcaaagagcattgctacctgtctaacatatccagctatcaggtgcaaagttatcattcaagctgcagactcggctgaaccaacctccaaaacaatgataaaatcacagaaaacagtgtctagtgttctctatggaatatggaaaagggagggcttactgggatatttcaaaggattgcatgctcagatcttaaaaactgttttgagctcagcactgctcttaatgatcaaggaaaagatctctgctactacctgggtgcttatccttgcacttaaaaggtacctattacttccaaggggtaggattaagaacttgtaatttataatagcagttactggaggaagaagcttcaattcgttgcggataatgaatgtggttggagtgcaaagtgtgcactttaacagatacatccatctcttcaaagttgagacgagattgttttggtggcttctcttctgtcctcttccctggcttattgatatagaacaattagtccaggaatttatgcaaaagactgatagagcaaggcaaagtagaaaatcttgacaataaatggtttttttatttttaaatatttcttgtttcaaataaaggcttgcattacttatttattttttgtagttagttcttttatatgtagtggaattcccacatcagaaggatgtcagttaagagtagtgtaggagctttataaataagcatcctcttttatgtatgtagtcaattcagtttcagattgctgaatagttttgttctgattcttttgttgtgtcattttctgaatcttttttcagacaagggggtacctgttggtgtgatagttagctggttctagcattggttcctagtcgttattcaggggagttttctatcaaatagtatcactgatgagtttctttgcagtgtggtgcaataccaaaaactatgatccatgctttgttacacagtgaaggtgctatgaacaatttaagtttgtaactcactttcattcagcatttgagagaaatagttatggtacataagtatgtaattggttgatgtggccggtgattgggatatt

SEQ ID NO: 82 - DNA, 3026 bp, Glycine max
acggtgagaagaaagtcgaagacgacacaaagaccagctaaacttcattttgaaacacagaaacaacccaaaaaaaaaaaacctctctactttctctctctacattctccgccatttcccgagaaaatctcgccaggtaaaaaacacacgctctgtcactcgtcgccgttcaacattgcgactctcttcgattttctctcgctccacgcaccttttcgcgttgagtctttccgttttcgcttttttctgttcgagattctttgttgactgttgacgcggttcgatctgtgcgatgctgtgtttgcttactttgcactttgattccacgctcggtgataactaataaccaatctgaagtttgtgttgcaaagaaaattgtgaccatgatccatattacttcatggtttggtatgctagctaaatctcatgctttccaaataattctcatggtggatgtatctgctttcaacacatgcttccaaaggatgatagttggtattgatatttgattatcagttacatagcagactaaaaagaaagaattgaatcttgcactgctaatcagtgaaagttttcctacagttatttctttgaatctgatataccatctgcatcccttttttttcttctatgtttgtttcctccataattaccacaagggattgtatgaaagataatgaccaatttagtagtagtttgacatccttgtgatctagtaccatgaagattcaggactattgactcgttcataggatcatcaaaatgaagaagttgtatggaggagttctgattgcctcactgtttacgttgtttatgcttatgatcctgcgatacggggtcatgaaaaatcctattggtgaaggttatctgactatacctgtcctcattaatggtactaatcctctattatggataaatcccacagtaccggatgctattaaaaaacatccagatggtcattctcaagttatttcttctgatattttagtatctagcctctttactgggagcaacttttccaaagaagagcaacaagctctgcagacatggaaccaattgaaccacttaattgataatgttcagggtttacccaatgcagcagaagctatcaaggaggctgccagtgtgtggaatagccttatttcctcaattgaagagcaaaagcaaggtcatggaaatgatagttcaagagctaaagagaagcagtgtccccattttcttaataacatgaattccactgaacttggtaatagtagttataaactgcaattaccttgcggcctgacacaaggttcttccatcaccataattggcattccaaatggcctgctaggtaattttcggattgacttgactggagaaccacttcctggggagcctgatcctccaattgttttgcactataatgttcggcttcatggggataaaatcactgaggatccagtaattgtccaaaactcctggactcaagctcatgattggggtgaagaggatcgttgtccatcccctactcctgaaaagtttgacaaagttgatgatttggagcagtgcaataagattgtagggaagaacattagccaacgtcacccagctggcatgcattcccacacttcaagacaatcttcaacaatggacgaacaatcagtaaataggaaatactttccttttaagcaaggttacccatttgtggcaactcttagagtgggatctgaaggaatccagatgacagttgatgggaagcacataacctcgtttgctttccgtgaaactttggagccatggctagtcagtgaaataaaaatctcaggggacctcaaattaatatctattcttgccagtggtttgcccacatcagaggattcagagcatattattgacctagaatcattgaaatcaagtcctatatctgcacagaccccattggatctcttcattggtgttttctctactgctaacaatttcaagcgtcggatggctgttagaagaacctggatgcagtacaatgcagttcgatcaaatacaacagctgtgcgcttctttgttggtttgcataaaagcactgtagttaatgaagagttgtggagagaagcacggacttatggagacgtgcagctgatgccatttgttgactactacagcctcatcacctggaaatctttagctatctgcatttttgggacacaagtttctgcaaagtttgtcatgaagacagatgatgatgcatttgtccgggtagatgaagttctagactctttgcacagaatcaatgcggatcatgggttactatatggactcatcaatttggattccagacctcatcgaaatacagatagcaaatggtacatcagcccagaggaatggagcgaaggaacttatcctccttgggcacatggtcccggctatgtggtctcacatgatatcgctaggacggtgtccaagaaattcagagagaaccatttgaagatgtttaaactagaagacgttgcaatgggaatctggatcgctgacatgaagaaggaaggtctagaagttcgctatgagaatgaggtcagagtgtaccctgaaggttgtaaggatggttatgtggttgcccattaccaaggccctagggagatgctctgtttgtggcagaagcttcaggtagataaacgtgcaaaatgctgtggtgatagtaggaaatgattgatgactgaccaggttacaacttactgaaaataaataaaagaaaaagatcccccttttgaatggctggggagcttgtataatgattagaatagttagctttagcctgaaattattagaaatggttaatggtagggcatattcttagtcattaattcgtttaagtaaatctgatgattgttctatgtagagagagagagagagatttgtatagatcggtcaatcggaaatagtttatcagattttctggcacctaatcaattttgattgagatgtcattatactaagaaaccacaattttttatttttatttttatctccctgtccttttcttttaaagagga

SEQ ID NO: 83 - DNA, 2425 bp, Glycine max
tttactgtggaaaagagcgagaaaacttccattgagattggcgaaatcgtggtgtgggatagaaaaggcaaagaaaaaaagaaaggaaaaaacaaaattttcccagaaaagggaatccagaaatgcattgcaagaccgtttgtttgtcgttgagatttgatcctatcccttcactcccttgttcttggatctctgtgtcttcttgctattccaatctttctctataactcttttttctttctttttaaaatttttggccattgattctttaagagctctctgtttgagcaaaaatatccttttttgagcctcccccacgataacttgcatcaaatccaattctgggttggtttcaatttctcctaaagattcattcactttgttgcattgtttgtgcccgaggttttaaggttcgatgaagcggcaatgaggtgtgtggccgagaaatggaggttagatcagagggtatacaagtgaggtgtgataaacttcagagtcccgtgattcctaggacacgtttgaggatttggttcattcgtgtgtgctcaagcattgtggtgtggacgtgtctggttcagttagtgacagtgagtgaactatggcattcacatttgatttctgggattactaatggtatatatcacataacccaagttcagcttccaatacaagaggataatggggttgctcaatcgcctcctgtttttcttccgccaagaaattatacaagtaatggttttctaagagtttcctgcaatgggggcttgaatcaaatgcgtgctgcgatttgtgatatggtgacagttgctcgatttttgaatctcacattggttgttccagagcttgataagacatcattttgggcagaccctagagatgaagttcggatagtaaaaagagtgcccaaaaagttcagtagcaaacatggatacgccaccttggagatgcctcctgttagctggtcaaatgaaatatattacttggagcagattttaccactttttggaaaacataaggtgttacacttcaacaaaactgatacccgtctagcaaacaatggtcttccactttatttacagaaactcaggtgtcgtgtcaattaccaggcacttaaattcactcctcaaattgagaatttggggcacaaattgattcagatgcttcatgagaagggaccttttgtggcgttgcatctgagatatgagatggacatgttggctttctcaggttgtacttacggttgcactgataaagaagctgaagagctcaagcagctgagatatgctttcccttggtggagagaaaaggagataatttctgatgagaggagatcacagggtctatgtcctttgacaccagaggaggcagccttagttttgcgagccttaggttttggtagggagacacagatctatattgcagctggtgagatttatggtggtgaacgtagacttgcacaattgagagctttatttccacgaattgtgaaaaaggaaacattgctaacctgggatgatttgcagcagttccagaatcattcatcgcagatggcagccttggattttatggtttcagcagccagtaatgcatttgttcctacctatgatgggaacatggcaaaactagtggaaggtcatcgtaggtattctggttttaaaaagaccatcttattggatcgaaaaaaggtggtagaattggttgatatgcatcagaatggaaccctttcatggattgagtttgcagatgctgtgagacgggttcacgagaagagaattgctcagccaactcggcgaagagttatattagataagccaaaggaagaggactatttctatgccaaccctcatgagtgcctgtgtgaggaaacaaattgtgatgacttgctaggtcctcgtaactctagtcaggtatcatcatgagttaggagatggaatccaaaaaaatgcacccattccactcacttgctcaagtattgtgttaagaatgaagatcactgctcccaagaccttagattacaagaattttgtaggaaatcagggaaaggaaagcacatgagtaaaaataacaacaaaaagagaggaaatattagcttatgttgaggctagcaaaagatgccccttcatttgttgaatcttcattagttattttttttttttcatccgtctctttaaagtttcattcaatgaatatttgacagttcacattgaatatacattgaaaaaaaaaagaggataaaaagagaacgagtagcccattatcgtatcctaatctcaaaggatatgattttaatgaattgacatattaggactttaatgattcggtgaattgataattttgaaatccattagaattgataaccttgagtcatttctgttggctaagtcatgggaaatgaattgtaaatttgaaaatttgattgttcacg

SEQ ID NO: 84 - DNA, 2080 bp, Glycine max
aaatcttttgtctctctcttcattttggttggaacccctcttctttttttctcttgtcttttcttttgttctcatcatcgtctcaacaacgagttaaaggacaaaggaaacctctaccaacaccaccacacgtaggagaagctagccaagagagaggaatcatagttccttttttgggaacaacggttcctcctttatgctaccggcaccacctcttcgattccttcataccatacccccctaggtgtttttcttcaaattgaggtggtgtgtggcagacaaagctatgtgatcaccttgatggcctccatgttataatcagtcgtaggtgtatcattgtctagattgctatttttttttaacttaaggggggttaatcatagatacactagtactacttaatctttttttgtggtgatacataataaagacaaaatgttggccggattagtgaagaagattacttccaccacaatggggagctgtgcctcaaatccaaacagaaagagcagttgtcagaaaagaagaaaacaaaagtctgggaaacgcagaggaaacattcccactgcacttcctgatttgcctttggaaagggttagcaatgccggaagccgtgtgggagacttctctctcagtgactttgttcacctggactttgagaatggtgcttcagccccctgcagaagatcagaggtttcaaacatgaaatttcatctcactcaataccatagtcatagtcaaattgatgcaaatggaaaataccaagaagaagcatggtttgactcagttagcattataggatccgattcagatgatgaattcagcagtgtgcatggagattgttttccctttcccaacaattctttgggaagtgccccaaatactcagctactccagtatgaaagtgcatcctgcattttagattcaggtcgtaaatatgaggagttttatgaaagctacctcaaagtagatggaggtaactataagagtggcgagaaaactcaagaaaacagcacaaagcaatcaacagttatcatgctttcagtaaaaaggacttcaattgatggacatgacaagactgaatcatgttcatctgagaaatttctttaccgtcctagggcggggcttcaaattccaggttctattcaagaaaagcctttacctagtacatggtctgcgatttcgccttcagtgtttaagcttcgcggtgaaaattttttcagagataagcagaagtgccctgctccagaatcctgcccatacgtaccaataggtgttgatttatttgcttgtcctaagaagataagtcacatagctaagcatcttgaacttccacctgtgaaagaaaatgagagtttaccttccctcctcattgttaatatacagttgccaacatatgctgctagtgtgttccttggtgatgccaatggggaaggcttgagtcttgttctgtattttaagttgtctgagaattttgagaaagagatctcaccaaattttatggggatgatcaagggacctaactactttgagatagacctagatatacatcgctttagctatatatcaaggaaaggacttgattcactccgagaccgtgtaaagcatggaatacttgatgttggtctaactatccaggcacaaaagcaagaggaacttccagaggaagttttgtgttgcttaagattgaataaaattgattttgttaaccatggccaaattcctacacttgtgactcttgacgataactcaggcgtgcattagttgatcaatggggggggatcagaaaagaaaagagaagagattcattgatatttatgaaagaatggggtgccaaatctatttaattaaccgggggataaaaaaaataagaagaggaaaaagagaagcaaatttgaagaaattttagccttcaccgacgtgcaagattgatttttattattattattattattcatatgatatgatgtaattaaagtcctatatgttactttgcatgataattatctttcaggaatcatgatgactacttaggtgaccgttgtaaaaaagacatcttgaaatgtataattaaagaaaa

SEQ ID NO: 85 - DNA, 2149 bp, Glycine max
gaagaaaagtagaaaagagagtctgcgtttttttgggtacttttcggagttgcaggttttggagcatcgtgtcggggaggttctcatttttttattaaaaaatttaattaaagggttttttttttctcattttaattttcttcatgtggtaggataagaaaatattattatttaatttaattacttaaattactatttttctttcctaagttatagacgtgagagaagatcaaatggtgcgtgtgttcatattattataatattcataaaaacaagctcatatttttgtgtattattattatatatatgtactgtttgttgcttcgtaacaacaccaccacattcgcagagccgctttctttgtttttggactgagagattaccaaaacaaacccacgaatttttggtgtggcagatcacgattcctcagaaaactgtaatggcttttatgtcggaggtcaacatgagcttctctcactacatggatgatgaatatgagaaactcttccggagaatgaaccctcccagggttgtaatcgataatgaagcctgcaagaatgccaccgttatacgggttgatagtgcaaacaagcatggaatacttcttgaagttgtacaaatcctcactgatctaaacctcatcataactaaggcttacatttcttctgatggtggatggttcatggatgtttttaatgttactggccaagatggaaacaaggttactgatgaagctattttggattacattagaaagtctcttggtcccgaatcttgtgttacatctcctatgagatctgttggggttaagcaaacaacggaccacattgcaattgagcttatggggactgataggccagggctgctttcagaagtgagtgctgttctgaccaacctcaagtgcaatatagtgaatgcagaggtgtggactcacaacactcgtgctgctgctgtaatgcacgtgactgacgaagaatccggttcggccattactgatcctcagaggctttctataatcaaggagcttctatgcaatgttcttggtggtggcaacaagaagaggggggctaagactgttgtcacagatgaagccacacacactgagagaaggcttcaccaaatgatgtttgctgatagggattatgaacgagttaatgatgatgatgactttgatgagaagcaaaggccaaatgtgaatgttgtgaattggtctgacaaggattattctgtggttactattcagtgtaaggataggccaaagcttctcttcgacacagtttgtactttgacagacatgcagtatgtggtttttcatgcaaacatcgatgctgagggtccagaagcatatcaggaatactacatcaagcacatagatgggtcccctgtgaaatcagatgcagaaagacaaagagtgatacaatgtcttgcagctgcaattcaaagaagagtttctgagggtttgaagctagagctctgcaccaccgacagagttggattactatctgatgttacacgaatctttagagagaatagcctcacagttacaagggcagaagtggccacaaaaggaggcaaagctgtgaacactttctatgttcgtggtgcttctggtttccctgttgattctaagaccatagaatccataaggcaaacgattggcaatacaatccttaaagtaaagggtagtcctgaagagatgaaatctgttcctcaggattctcctaccagatccctctttagtggtcttttcaagtccagatcttttgtgaactttggcttggttaagtcctattcttgagaaagccattaccacacttgttgctgtcttttcttgtgtacagtgaaagaggtgaagatgcaaaagggcttttactaggaagtgtgacacgactttagttttagggaagtaagtaggaacaccatcatatcacacgctagggagaaaagtggcttgtaaattctctaccccttctgctttatatagcttagttttttccaatatggaatccaatcacactaggttgagtgatgaaagcaaaagagaaccttagttgtgtaagcttgaaacaagtagtttcaagcttttcatcatttgtaaatatactcattcattttctagcagcagttataatctttctcatcttcctca

SEQ ID NO: 86 - DNA, 1453 bp, Glycine max
caattagtctgctcctagtgctatgttaactgatgctccttctcaaccaaattcaaattctgttatttggattcctgattcaggtgcttcctgtcattttattggagaatctcagaacattcagcagatagaaccttttgaaggaattgaccggatcttcattggcaatggtcaagatttgaagattacttcctctggttcttcttccttcatttccccttacaattccaaagtgtttttgtctcttaatcgtttcttacatgtcccctacatcactaaaaacctcgttagtgttagtcaatttgctagggacaatggtttttgctttgaatttcactctaattattgtgctgtgaaatcccaggttaccaatgaggtcttcaaggcactgttggtcctgatggtctctacagtttctccaacattcagtttcaacatccttcatctagttctgcttgttgtattttcagttctgcaaactccactgtaaatccatgtaaaaagactgaaatccatgcaaaatttgattgatccctgtataaaaggaactttgaatgtgcttaactcttgtgtaaaagcaactgtgaaacattttgtgctcacctcttcttgctcttccataagataccgtgatgatgtgcaagaagtgtgtcctcttaatgaatctcattggactgatctagagtattgcaaacgctataagctgtggtatgcatatgcaaagacaatagcagaaagagaggcttggaggattgcaaaagaaaatggcatggatctagtggtggttaatccctcttttgttgttggtcctctgcttgcaccacaaccaactagcacactgctcttgatactaagcattgtcaaaggcatgaagggagaatatccaaatacaacagtggggtttgtacacataaacgatgtggtagctgctcacttgctggctatggaggaccccaaggcatctggaaggcttatttgttcaagcacagtagctcactggtcgcaaatcattgaaatgcttcgtgccaaatacccttcctatccgtacgaaaacgagtgtagcagccaggaaggagataataacccgcacagcatggacactaccaaaattactcagttggggtttcctccattcaaaactcttgaacaaatgtttgatgactgcatcaaaagttttcaagacaagggcttcctatgacatctgttgttacctttcgtgttggtgtgaggtgtcagtgtcatatgacccaaactaactagctcataaaaccaaataaaagaatttaactttatcttttatctatgtatttattccttctttcttgtttccacaacttacattattattagcttcatcgattcatgttacaaaagatttaactcagctaatgtcgtgctttacttttggtccaactttagataataacctagcgctaacaaaagttgtttatat

SEQ ID NO: 87 - DNA, 2491 bp, Glycine max
ttttatagtaaaaaaaaatatgtcctattggtggccataactccaaaagtggtggtgtgaacgcttgacaaagagtggttgcagtggcaaacaaactcatcagatcctccaaacctcaagcttaggctataaatactcaaatttgtggccatgttatgtactagaatacgaatagactaaaggggtgttttgaaaagatggagcagaaagaaaatcatgctagaaggaaaaagggagggctcatcacaatgcccttcatctttggtaatgaggtttgtgagaagctggctgtggtaggtttcaacacaaacatgattagctacttgacaacacagcttcacatgccattgaccaaagcagctaacaccctcactaactttggtggaactgcaagcttgacaccattgcttggtgctttcattgctgattcttatgccggaaagttctggactgtcacccttgcttccattatataccagatagggatgattagtttgaccctatcggcagtgctaccacagtttaggccacctccctgcaagggtgaagaggtgtgccagcaagcaagtgcaggacagctggcaatcctctacatctcactcctcctcggggcactcgggtcgggtgggatccgaccctgcatcgtggcgttcggggcggatcagttcgacgagtctgatcccaagcagacaacaaggacatggacctacttcaactggtactactttgtcatgggtgtagcaattcttgtggctgtgactgttttggtgtatattcaggacaatattggttggggaattggccttggaatccctaccattgcaatgttcctctcaattattgcattcattgtcggatacccgctttaccgtaacttgaacccgtccgggagcccgtttacccggttagtgcaagtggctgtggctgcatttcgtaagagaaaggtcccaaatgtgtcacaccctagtttactctaccaaaatgatgaactagatgcctctatttctatgggagggaagcttcttcacagtggacagatgaaatttttggacaaggcagcaatagttacagaagaagatgacaacaaaacacctaacttatggagattaaacacaattcatagagtggaggaattgaagtccataatcagaatgggtccaatatgggcatcaggaattctcctcatcacagcttatgcccaacaaaacacattctccctccaacaagccaagaccatggacagacacctaaccaaaacctttcaaatcccagctgggtccatgtctgtcttcaccatccttaccatgctcaccaccactgccttctatgaccgagtcttcatcaaagtggctcgtaggttcaccgggctggaccgtggcataagcttcctccacagaatgggcattgggtttgtgatctcaaccttagccacattggttgctgggtttgttgaaatgaaaagaaagaaggcagctttggcccatgggctttttgaccacccacatgccataatcccaatctcagtgttctggcttgtccctcaatacagccttcatggaatggctgaggcctttatgtcaattggacacttggagtttttctatgaccaggcccctgagagtatgaggagcactgccatggcattattttggactgctatcgctgctgggaactatgtgagtaccattatggttactttggtccacaagttcagtgctgggtctaatgggtcaaattggctccctgacaacaacctcaacaaagggaagttggagtacttttactggcttatcaccatattgcagtttctcaatcttatttactacttggtttgtgccaaattgtacacctacaagccaattcaggtccatgacaaaggggatagcaattcagaagggaaccaaattgagctctctaccacggtttaagtgtggtgttgtagggattaagtggtttagatttagagtttcttacccttttagtgtccatgcttagagattgggagtctcacgtgttgtatataaataataaatactaatattaattactaaaatagttgaaaaagtgcttccattagcttgtatacttaaacatgtctttactataaataatgattgttgctacaaaataacagaagtaaaggcaacaatcaaggattatgttgaagtcccaaaagccttttttatcttggttaccaacaccaaagggatgaatccctatactcacaaaaatcattgaaggcatttaaagtttttttttttttttagagaaaagttatgagaagttctattctcatgtttttaataaattcttctacaactaagagaggtgggaaaagaaaatgtggaataagatggatagtgcacatgtcctgatgcacggtgacattgtcatcaacacacatttttcttaacgcattgtatggtagtttcaactttcaaggtcaacatgaattttcaatgtgatataacgcccaatcaagtaaactgtg

SEQ ID NO: 88 - DNA, 2288 bp, Glycine max
ttattacaccgacaaatgtttcagatttgctttacaataattattagtcctcatactgataccattccactgccaccccaccccattagcttcacaacctcatacgcatggcaatgccataatcatggcgcgtggcacctctcactaaaagctctctctctctctttctctctctcatactctgaaaattcatctttctttgttagccgttgagtgtttcattttagttttaccctccattttcacttcaatcatttcataacgttccctgtttaaaactcttctttcattactgttccttaatatttatttattattttcagtgcccccattgaaagttttggcctttgctatcatgaattcatgatcctttcatcgaattgatatacctctttctctctctacaacaaggtgctatgtttctacttctcttacagtggtgaactttacctatttctcttccactctctactgtttcaccaccaacaattaggactatatagaagttgccacacagtgaattggtgacaagaaatggagcaacaacggcgttggcacgacgtgttctggttagggatatttgtgatccatttggttggtatgggtttggttcttggggttttaggcctcaacaggttcaagcaaaagaacaggcttgacattgataagtacacctaccggttcatggagaatgaggctggtttgacggaggattactggccgctttatgcagtggccggtggcctaggaaccgcccttggatggagttggttgctgctgttaggctcgcgcgccacccagatgatgaaggtgtctgtgcacatactcaccacttaccttgctgtgatcagtgttttgtgtttctgggcagagcagtttttctggggtgttgcctttgctattggggcagcccttcagttcttgtatgtgatttctgtcatagaaagacttccatttacaatgttggttctgcaaaaggctgtcaagatggtatggaatattcctgaagttatgagagtagcatatgcatttatgcttgttgtgcttttatggatggccttatggtcatttggagctgctggtgttgtggcttcaagcatgggtgacggtggacgctggtggcttctagtggtcctctctataagcttattttggacaggtgctgtactctgcaacactgtgcatgttatagtgtctgggacagtggttcttgttagtatccatggtggtagagaggctgtatcaattcccgctaactcctttatgaaatgtctacaatatgctttaacgacttcttttgggagcatttgttatggttcattattcacagctgcaattaggacactgcgatgggagataagaggaatccgatccaggataggcaataatgaatgtttgctttgctgtgttgatttcgttttccatcttgtggagactcttgtccgtttctttaacaagtatgcttatgttcagattgctgtttatggtaaaagctttaaccgttccgctagagatgcgtgggagctattccagtcaactggagtagaaacacttgtggcctatgattgttcgggtgctgtgctgctaatgggaaccatttttggtgggctaataaccgggacttgctctggtgtttgggcatggattaaatggaatgatagggcttttatgattgggtccacgtctatgctcatgggaatgatcttggttggagttgctatggttgtggtggaaagtgctgttacatccatatacatatgttatgcagaagatcccttattgattcagaggtgggacactgagtttttcaaccagatgtctgagacactgcaccaacgacttcaacataggagttcacgtggtgcaagggaagttttaacccacgatcagcttgattcacacgcctctatttgaggaatcatttgatgtcacaacactacacactttaacacttgtccattttaatgtcaaatcctttagcctttacgcattagcatctttttgtttcattttgtgacacgttgatagggtaacttcatgcttcaaataggggggaaatttgatggttgtgactggctttgagcaatgttgggttgggtatgtaagttccattgctccttgggttgcctcaaatatgagtcattttgtacccctaaaaaactaaagaaaaagaaactggagacagtgatggtcttgattattggtgtgtatgatatttaatataatttacaaaatgtacagtatttttttcctgccgaagcacaaaatgtacagtttccttcaattta

SEQ ID NO: 89 - DNA, 1939 bp, Glycine max
atacattaggaaaaaatttcctcattttacgggtttagctagcggcgttggcactggcacgcacacagtcgataccacccaccggcaccgtgttcgttctttcgctgccccgtctaacttcttttaacttcatccttcactccacccaaaacgcaccgttgcacagtccccctcccccgaatcgcatcttccccaacacacacacacacacaaaccctaatttctcaaaatgtggtctgcaacatcctccccttccatcttcctcccccattcccttcttcgcccccttcctcgccggcggcccctctgcgcctccctctcttgggcctcccccgacccatccgacggcctcggaggctgggccctcctcgacgccccggcccaacccgacaacaacaaagttgcggcatttccttcttatgccgttgttggcttcggcacttcgctcgctcttgtgctcgctgtctttgctgcctcaaggaaaggttttagttttcgattcccgaggccgatgtggggtgctgtggagactcggcgagatcaaaacgacgctccggagtttgacgtttcgagtgggagcaagtcaacgctgtccgaggccgacccggagagcaatgttaccgttacgcaagctgataaatctgtagctgtagaaaagcctgaacgtgttgtcatcccagtttctgtggattctacccaagaagaagcactgtcagtcttaaaatcactgaagataattgaagatgatgtggaagctaatgaattgtgtaccagaagagaatttgctagatggctagttaaatcaaattcttccttggaaaggagtcctaaacacatgattgctccaatagtatcactttctggatctgtagttactgcatttgatgatgtcggtattgacgacccggactttagatcaattcaagtcttagcagaagccggtgtgatccccagcaaattatcttggaataatagtttcaattatggtggatctgactctcaagaaaacataaatttttatcctgatagattcatctcacgacaagatctaatagactggagagctcagttggagtatgactttttctctggggtagttgacgagatatcaattaaaaaagcaggttatatggatgtgaaggagatcacttctccagcagtttatgtggacatgctggcaggggatacgagtattcttagaaaagtttttggacagagcaagcgatttcagccaaacaaaccttcaacaaaagcacaagcagcggtggctctgacaagtggcaggatgaaggaagcaatatcagctgaattgtcaagaatagaagctgagaattctgccaggctggctgaggcaggagagatctggtctgagttgcttagccgaggagagatacagagattttgggatgaaaagcttattgaagagaaaaatcgtggttttgatgttgagaggctttatcacgtggaagtaaagaatttggaagaagaggagatcaatcaagataagatatctgctgagtatttaaaagaaaaggcaacaatggattgtcagaagcagcttctgcttaacttaaagaaagaagttgatgagatatcagaaaaagtcgcatcagagagagtcacatatgtagacgaaagggatgttgtacaaaagttgcatgaagatttagaattcaagcatgaagaattgctcaacaccaaatccacgctggaagctgaaaaagaagctcttcagattcttaggtatccattttgatttatggctttccaaattacaatttcaaaattgggaggcttgtaaagtctaaggagtggggaggttagggagttggttatttggttttggtgtcaaaacacatagctgcggtaagcacattcctatgaattatgatagataaatggttagggcgctttcttctgaaggtccattcaatatggc

SEQ ID NO: 90 - DNA, 2695 bp, Glycine max
tttaattcgactcggtcctattgcatagactccatggatcccactcgagctttcgtcaattctgtcaagcgtgttgttgtcaaggttggaacagctgttgttactcgaagtgatggaagattagcattgggcagaattggagcactatgtgagcagcttaaagaactaagcagtcaagggtatgaagtcatattggtaacttcaggtgctgttggtcttggcaggcaaaggcttagatatcgcaaattggccaatagcagcttttctgatcttcaaaagccacaagaagagcttgatggaaaagcatgtgcggctgttgggcagagtagtctcatggctctctatgataccatgttcagccagcttgatgtgacttcttcccaacttcttgtgaatgatgggttcttcagggattctggcttcagaaaacaactttcagacacagtgaactcattgttggatttaagggttatccccattttcaatgaaaatgatgctgttagtactaggaaggcaccatatgaggattcttccggtattttctgggacaatgatagtttggctggtctattagcccttgaacttaaagctgacctccttgttttattgagtgatgttgaggggctctatagtggtcctccaagtgacccaaactcaaggttgatccatacatatataaaagagaaacatcaaggggaaattacttttggagacaagtcaagattgggcagagggggtatgactgctaaagttaatgctgctgtttgcgctgctcatgctggcatcccggtcattataactagtggctatgctacaaacaacatcatacgagtgcttcaaggggaaagaataggtactgtctttcataaggacgctcatttatggaccaatataaaggaagtaagtgcacgtgaaatggcagttgcagcacgtgagggttctagacggcttcagatcctcaaatctgaagaaaggaggaaaatattgctggcaattgctgatgcattggagacaagtgaaagtatgataaggcatgagaatgaagctgatgttgctgatgctgtggcaactggatatgaaaaatccttgatgtcacgtttaatcctgaagcaagagaagatctctagtcttgcaaagtctgtgcgcatgctggcagatatggaagaaccaattggtcaaattttaaaaaggactgagctagtagataaactcatcctggagaagatatcatgtcctttgggtgtccttctggttatatttgagtctcgacctgatgcccttgttcagatagctgcattggcaattcgaagtgggaatggtttactgcttaaaggtggaaaggaagcccgacgatcaaatgcaatcttacacaaggtcattacttcagtgatgccggatactgttggtgacaaacttattgggcttgtgacttcaagagatgagattctagacctacttaagcttgatgatgtaatagatctagtggtccctagaggcagtaataagcttgtttctcaaatcaaggaatcaacaaaaattcctgttcttggtcatgctgatggaatttgtcatgtatatgttgacaagtctgctaatattgatatggcaaagcagattgttagggatgcaaagaccgattatcctgcagcttgcaatgcgatggaaactcttctcgtacacaaggatctgtcaaataatggtggacttcatgagcttgtccttgaactccaacgtgaaggtgttaaaatgtttggtggaccaagagccagtggcttactaaacattgcagaaacgaacacttttcatcatgagtatagttcacttgcttgcacagttgaaattgtagaagatgtatttgctgccattgaccacataaatcaacatggaagtgctcatactgaatgcattgttacagaagatagtgaagttgctgagactttcttaagtcaagttgacagtgctgctgtattccacaatgcaagtacacggttttgtgatggagcacgctttgggcttggcgcagaggttggaattagtacaagtcgaattcatgctcgaggtcctgtaggagttgaggggttgttgacaaacagatggatattgagagggagtgggcatgtggttgatggagatcaagggatcaattacacttacaaagagttgccactaaaagcataactttgcatgcagaacttagctcactttcaagctataacatgctcacctcaacaaagcagcatcacttttctgttctgttatgatatgcagaagttgctgagatgctggccatgtataatcgtaactatcacttgaccctttccagggcctttttcttacctggagcaagctcaaggggggaggaaataatcgtaggaatgctactgtttgattatacttttataacatattccgagtttgtaaaacagcaatgctgtgacagttacaaatattattcactacgtactagtgaacttgaataattacggagaagttattattatagagaattcaatttgttttgtgcagaattgttgttagtcaagtgctgattctgctgcatgtgattaattctgatatatcagttgtattgtagtttatttatttacttatttggaatgattaggtctgttagtcaaactgaatgtttgtttacttgatctagtgtttctgctttaaattcttgatttgattggcc

SEQ ID NO: 91 - DNA, 2105 bp, Glycine max
ctttggaaactgcttctcttcccacacagctcacacccaacaacaaacatacaaactctcctctcacaagggcaagacagtaattccacattcccaacaacggagccaaccaaccaaaacctttctccttcttcctcttcctccccaattcccattcagatccgattaagccttaaccctaattcccctcccaccacccaccaacaatgggggacttcaacctggcgctggtgatcgtggcgatcgtggtgtgcgtcatcgtgttcctcttcaacgtctacctcctcgtcaacttccagcaccccgacgacgtcaaccaggcttacttccccaaattcgtcgtcgtcctcggcctctccgtcgctgccatctccatcctcatgctccccgccgacgttgccaaccgccaggcctgccgccacgccatctacaacggcgcctgcaacctcacgctcccccatgaaggacctctggctcgcaatttacatcctcgacgccgtcctcgtcttcttcgttatcccctttgccatgttctactacgaaggcgaccaggacaagagtgttgggaagcggattaagagcgcgttgttgtggatggtgaccactgccattgtgtgcgctcttgttttggggattttgtatggacttattgggaaggtggactttactgttaggcatctctcttcttccacaagccaatttcctagcacatgggacttcaatagtggtcaacaatgtattggaaacacccatcagtccttcatcagaaaaaacatggaccatgcgtactacctttcctgaatatgtcgttgctcttgccactattgttggatctgtgctttttgctatatttggtggtgttggtattgcttgtcttccattgggacttatattttcattcattcggcgtccaaaggctgttatcactcgttcacagtatatcaaggaagcaaccgaactgggtaaaaaagcaaaagaactgaagaaagcagctgagtcacttcatcaggaagaaagaagtggttcgaagggaaggaaatttcgtaaaaatgtgaaatcagtagagaaggagttgtttcaattggaagaagatgtcaagcttcttgaggagatgtatccacaaggggaaaaggctgagacaacatgggcactaacagttctagggtatctggcaaaatttgttttgggcattttagggtttatcgtttctgtggcatgggttgctcatatcattatctatctattaattgatcctcctctttctcctttcttgaatgaagttttcatcaagctggatgatatctggggtcttctgggtacagctgcatttgcatttttctgcttctaccttctccttgctgtgattgccggagccatgatgcttgggctgagactagttttcattactatacatcccatgaagtggggagcgacgctcatgaactcttttctgttcaatgtggggcttattcttctttgttccattagtgtgatccagttctgctccacagcatttgcctactatgctcaagcaactgcagcacaggaaatatttggccacaccttggaatctcttcgtggaattaaatatttgtacaagtacaacgtctttcagattgcatttgttgcattggctggattgacttttgtatattatgctgccttgggatggagaagaaagaagcctagtggtaggtttcaattgtctacatgaggttatggtttatggcatggaagagtgtcttctaaagggagccatcgggtattcttatcgcaaaatctcatttcaagtggcttttattcggatgtgcattggcctagttttgttttaatgtcgaaagctatcaagttggctgatcagcatccgaatagaatcattttcctgtggtgtcatcattaggtgggtgcttgtggtgccacttaggtctttgatgattctttcctcgcccttgtatgtattattcattcgtttgatttgtgcagcacattcttctgattatgtaattgaatatatgtgcacaagagactactgggttctactaaccctttgatgtataatgcaactcttcccaaacataattgtaccagttgtcattttaatattc

SEQ ID NO: 92 - DNA, 576 bp, Glycine max
atgggcaccaaactatttcacacattgctcctcctctcttacgccctctccaatgtcataggagaagaaacaggcttcgtgggcacactacaccccaaatccttaggtcttcacaagaaacaaaccctaagccacttcaaattctactggcacgacatagtgagcagtggagccaactccacctcagccacagtcatcccaccactccccaaatacaacacaagcacttccttcggcatggttaacgtgatggacaaccccttgacgttgggccccgagatgggctccaagctcgtgggccgggccgaggggttctacgcactaacatcacaatcccagatcaatttgctcatggtcatgaactttgccttgtttgaagggaagtacaacgggagcaccataactatcgtggggaggaacgctgttagtgaaaatgaaaaggatattcctgtggttggtgggagtgggatttttaagtttgctaagggatatgctcatgccaagacctacttctttgatcccaagactggggatgctaccactgagtacaacgtttatgtcctccataacgagtaa

SEQ ID NO: 93 - DNA, 1141 bp, Glycine max
accttcatgcaaaagactccccaagtcaacacccacatcacctctcctccctctcatagcttctttttatatccatattctcacccctctcttcatccaatcccacttttctttgagcaaaaccaagaaacccttcacacaaaccccaccaccaaccatgggcaccaaactatttcacacattgctcctcctctcttacgccctctccaatgtcataggagaagaaacaggcttcgtgggcacactacaccccaaatccttaggtcttcacaagaaacaaaccctaagccacttcaaattctactggcacgacatagtgagcagtggagccaactccacctcagccacagtcatcccaccactccccaaatacaacacaagcacttccttcggcatggttaacgtgatggacaaccccttgacgttgggccccgagatgggctccaagctcgtgggccgggccgaggggttctacgcactaacatcacaatcccagatcaatttgctcatggtcatgaactttgccttgtttgaagggaagtacaacgggagcaccataactatcgtggggaggaacgctgttagtgaaaatgaaaaggatattcctgtggttggtgggagtgggatttttaagtttgctaagggatatgctcatgccaagacctacttctttgatcccaagactggggatgctaccactgagtacaacgtttatgtcctccataacgagtaaactattgatttgatctctgaaatatcatattttctcttaaagatagtctttacaataatgaaattgtatcaatggtctctgaaatattcaatacccatcatttagtcgttacggttatatattttaataatcgtaagcgactcatttgaagaattttttcaataattgagagactatttaatatgatttctaatcattaagagattggttgtgtaatttttttatgagagtactatttatgagagaaaataatacttagaaatgaaattgatgatttacattgtaagagatttattctatttcatctttattttagggtttttcttttcgagtttatttttgtctttttttaatggttagtacgtactagttacgatgatttgaataatcgatcaaactttagaaaaa

SEQ ID NO: 94 - DNA, 1428 bp, Glycine max
atgacagtattcttagccacgaggctcgtgttgcggagatccccgccgcttctctggcggcgcagcttttctcgggcggcggtagaggccgaaaaggacactgttgccgtgccgtcgcttccgttgttcgattactctccgcctccgtatgcggggcccaccgctgacgagattctggcaaagcgcagggagtatctgagtccttccatcttgcacttctacaagaatcccgtgaacatagtggagggtaagaagcagtacctgtttgacgagaaggggagaaggtacgtggatgcgtttggagggattgctacggtgtgctgcgggcactgtcaccctgatgtggtcgaagccatagtcaaccaaaccaaaaagttgcagcactccacagttctctaccttaacaacgccatcgccgatttcgctcaagctttgacttccaagcttcccggtaatctcaaggtggtgtttttcacaaactctggaacagaagcaaacgaattggcgatactgattgcaaggttatacacagggtgtcatgacataatatctctaaggaatgcttatcatggtaatgcagctgggacaatgggagctacagctcaaagcatctggaaatttaatgtagtacagagtggtgttcatcatgcagtaaatccagacccttatagaggcattttcggttctgatggagagaagtatgcaagagatgtacaagatatcattaacttcggaacttctggaaatgttgcagccttcatttctgaagccatacagggagtggggggtatcattgaattggctcctggttacttgccagctgtgtacaataccattaaaaaaacaggaggacttttcattgctgatgaggttcaggctggctttggtcgcactggtagccatttctggggatttgaggcccacaatgttgttcctgacatagtgacaatggctaagggcattggaaatggcattccccttggtgctgttgtaactactcctgagatcgcagaggtcttaacccgccggagctactttaacacatttggtggcaaccctgtttgtactgctgcagggttggctgttttaaaagtaatagagaaagagcagcttcaacaaaacgcgtttgtggttggatcctatttgaaagaaaggctcactgccctcaaggacaaatatgaattaattggtgatgtgaggggaagaggcctaatgctaggagttgaacttgtcactgatcgtgaacttaaaactccagcaaaaggtgaaacgctgcatgtaatggaccaaatgaaagaattaggagtacttattggtaagggtggttactatggaaatgtcttcagaattacacccccgttgtgtttcaccaaagaagatgcagactttgtagcagacgcaatggacttgaccttgtctagaatgtga

SEQ ID NO: 95 - DNA, 2416 bp, Glycine max
gagtattttcttacgagaaccatgaatggaaacctcggatcatctagcacacacccttcagtttagtcacataatagttacatataatatttaatttgttgccgagttttcaatactagtagctgtaagtctataatactcgtccatagtaattctatctggctcgagcaggattacctcctgtgataaatacctgtgccggttaagtcagagttgtggtgatcagtgatcgagccacagcaagagccatgtacaagggaagattaggaggcaaggctcagcttggatatgttgaaactgaccctttgggtcgatatggacgtttcagggacattctaggcaaaggagcagtgaaggtagtgtatagggcctttgatgaggtcctaggaatagaggtggcttggaaccaagtcaagcttggtgatgtgtttcattcaccagatctacttccgaggctttattcagaggttcatctcctcaagaacttggaacatgactccatcatgaccttccatgattcttggattgatgtcaactgtagaaccttcaacttcatcaccgaattgttcacatctggcaccctacgagagtatagaaagaagtaccagcgagtagatatcagagcagtgaagaattgggcacgccagattctaagtggcttggagtatttgcacagccatgatcctcctgtgatacatagagacctcaaatgtgacaatatcttcatcaatggccatctggggcaggtcaagattggtgacttgggccttgcagccattctccgtggctcccaacatgcacacagtgtcataggtacaccagaatttatggcacctgaattgtatgaagaggaatacaatgagctggtcgacatatactcctttgggatgtgcatgatagaaatttttacttctgagttcccgtacagcgagtgctctaaccctgctcagatatacaagaaagttacttcggggaagctaccagaagcctattacagaatccatgacttggaagcccaaagatttgtgggaaaatgtttggcaaatgtctcagagaggttgtcagcaaaggagctcttgttggacccatttttagccaaggaacaactagactctccacttcctagcccaacattacctaaaaaacaagcccccacactcaatttcactgcatcacttgccaaagagttatctcagccaaagagtaaccaaacaaaggactcacacatgacaatcaccggatcaataaatgaagaggatgacacggttttcctgaaagtacaaatttctaacaaagatgggcaaaagagaaacattttctttccatttgacaccatatacgacactgccattgatgtggcaatggagatggttaaagaactggagattagtgacttggaaccattggagattgctaaaatgattgaggaggagatatcagctttggtccctaaatggagggattggggcagtgctgagtatcaaaagcagcatagttttagctatgaagaagagtatgacatgagtaaccaccaccctttcttctcaacatcttctcgctcttcctctcatgcttctcttccagtgtttggttcttcctacaagaataattcccactatcgtgggaatcattacccttttgctcaagattggcctcaagatgaactatttatgaatgatgatgcgagctctcaaagctcaatgaactccttcaagtgtttcaatttcaattgctgtgaccctggcaatgaagatgagcatgatccaactctagtactaggagcagaacacctttactacaccccaaaaggaaacgaaaagtgcataagattttgtcctagagaagaagtgatggatgctgatttcaccaaacagttatgcaacatgagaatggattctcacaggtgtcatggaatgcacaggctaaccaggatccgttccttcgtggacctgaggagacaacaactgcaacgatcactgatggaggagattcacaagaggagaatgttcaagacggttggtgccgttgagaacattgggtttcagaatccagaaggaggcggatgtttttcttattgaaactccaatctccataggttccaatgctctttttcttttttaacttgttatgctttggggtatttattaattattgtaatgccttatgaattaagatgtccgtgaatatttgtatcctatacggactcatccgaatattgcaaaataaaacttgtaatatagtttaatttatgcttttgttaggagatgtttgcttgtttgtaagacttctgttgtgatatttctctttttgtatgttgaaatatggaatttcttgaatttggattgggtttgaggtgtagattgccaaaacctttataagctctattttggcaatatttagtcaacctaggatttca

SEQ ID NO: 96 - DNA, 507 bp, Glycine max
atgcaattcaggctcggcaggcgcgttgtaagggttgctaaatgggtcttcggtcgggtcaggatcaaaacccgacccgggtaccaccaccgtctcggttctggttcgtcccatttgagaaatcccataataaagcttctcacctgggggcaaaaattaaagagaggagcgaagaccctatgcgggaaaaaagggtcgggttatcttccaatcgggtcggatccggcttgcgacagggctccggcggtgccaaaggggcacttggcggtgtacgtgggggaggaggacggcgagttccggcgagtgttgattccggtgatttacttcaaccaccctttgttcagtgatttgctgagggaagcagaaaaaaagttcgggtttgaacaccccggtgggatcacgattccgtgtcgactcaccgagtttgaacgggtcaagacccggatcgcgtccgggtcgggtcagcgcgggaggacccggagattggggtggcggctacattattaa

SEQ ID NO: 97 - DNA, 1240 bp, Glycine max
attggaccgactcagcttctctcttccttcacttattctttcattttcctcaaatctttcaaacacccacttccccattttcttctgcatcttcacaaatcacttcttcaaatcttcccaacaaaaaaaaaaaactcattttctatcatacagttttgggatctatcactctatccacggtttctggaatgaaactttccttgtttggtgttgttgttcttcatcttcatcatgtttaacataccttcatctctttctgaaatctgtctcacccactttcgccttgccatctccaccgcggatccatggcccttctcatgaatctcatgtcataaaaaccttttcctactgtttttcataccactgaaaagtcccacattgcttagaaaactctacaaagaacagtttataaaccttccgctgagaagataaactgctgatctttcgtgtagaccatgcaattcaggctcggcaggcgcgttgtaagggttgctaaatgggtcttcggtcgggtcaggatcaaaacccgacccgggtaccaccaccgtctcggttctggttcgtcccatttgagaaatcccataataaagcttctcacctgggggcaaaaattaaagagaggagcgaagaccctatgcgggaaaaaagggtcgggttatcttccaatcgggtcggatccggcttgcgacagggctccggcggtgccaaaggggcacttggcggtgtacgtgggggaggaggacggcgagttccggcgagtgttgattccggtgatttacttcaaccaccctttgttcagtgatttgctgagggaagcagaaaaaaagttcgggtttgaacaccccggtgggatcacgattccgtgtcgactcaccgagtttgaacgggtcaagacccggatcgcgtccgggtcgggtcagcgcgggaggacccggagattggggtggcggctacattattaaggacccggagggtggtcaattgcgatgacacgacgataactagttatggtgaatgattaatggtttcggaatttttgtttgtttttaacttatattaggttgtagttattgtttttggtgggaattcctgggtaggtgttaggctttggctgtttgggtatatctgatggtacacctggtgtaaatggtggtttgaacataaaagtataattagggataccttatgtatagattaaattctgaaaatatcaattaaagaaatgtttttttttttgaat

SEQ ID NO: 98 - DNA, 3468 bp, Glycine max
acacacaaatctgacttatcggttggtcccttcaaccttggcctttcactttctcttcctatctctctctcacgttcacattccatgccagtgttttaggcagcaccccttcatattctttcaaccagacacagagccagaaaaccctgaagaagccagagtcagagagaaacagagtaatactgtacacatatacacccttttcattctgtttttttttttttttctctctctctttcattatcctgtctgttatcttttgtatttgttctcttctatcttgttctttccatcttgcaaatctagatctcttcagatttgaatgccatactctgttttcttcttcttcttatttttttggtatctttgaatgtccttaacgcttcttgtggtgagtgtggcgtgtttattctgtgtgttatctttgaagctcctttctcttttttctttctttctcattttatcattaaacttgagaatggtatgaaccaagtagccggattcatctattgttatattttttgttgagttgaaacaacccgtgctaattaatccacatgtttggtggttgctttgttatatactcgagatggggtttcttagattgttggaaaaaaaatcaaaaaatgatttttttctgttttttttattgagctgggaaatcagcacaccttgtttccgtgttttttctcggttgtcacacttgcatagccattggtggatgtaacttgagagttcagacaaaacacagtggatcgggtatcactgacacatgcatgatgggagcttttcgtacgtgtgaagaaaaatgtttcacattggtggcttttccttttacgtagaagaagggaatatgacacagtatggtgtgagatccagtgcttcattttcctttttgtgtggaaagggtcctcacaagaaccgattattgttggggcccagtgtcatgtgaacatcttaaaggcaatgtgacatggaatggaaagtaactagtgtcggtggaagtatcagatttcgtttattaataagcccatgtcgttttaatgcttggtgactgtgtgtggagtattgaccagctggaattaatcatcaatctccttttccttatttctattttttattttccaaaattggatctgctatggaatttgtgccttgtttctcagatagtggaatatttgttggaccatgaagcataaagatggaaaaccgattaatcagccaaataagaaccgggctgtgactttggcagtcactttaattgctctatgtggtttttctttctatctgggaggaatcttttgctctggaaaggatggggttgtggttaataccattcagaagacccttgattctcctaagcaatcctcaggttctctgcaaattaagccaatcagtttccctgaatgcagcatagactatcaagactacactccatgcacagatccaaagagatggagaaagtatggtgtgtaccggcttactttgttagaacgccattgccctccagttttcgacaggaaagaatgcttggttcctcccccagagggttacaagcctccaatcagatggccaaagagtagagatgaatgttggtacaggaatgtgccatatgactggatcaataagcagaagtctaaccagcattggttgagaaaggaaggggagaaattcctgtttccaggtgggggtactatgttccccaacggtgttggtgaatatgttgatttgatgcaagatctgatcccaggaatgaaagatgggactgtgagaactgccattgatactggttgtggggttgctagctggggtggtgacttgttggatcgcgggattctaacagtttctcttgccccaagagataaccatgaagctcaagttcaatttgctctagagcgtggtatcccagctgttcttggtgtcatttctacacagagacttcctttcccatcaaactcctttgatatggctcattgctccagatgccttatcccatggacagaattcggtggtatttatctcatggaaatacaccgtatccttcgtcccggaggattttgggttttgtctggtccacctgttaactacgagcacaggtggcgtggatggaacacaaccattgaagaccagagatcagattatgagaagttgcaagaattacttacttcaatgtgctttaaattgtacaataaaaaggatgacattgcagtatggcagaaggctaaagataacagttgctatgaaaagctggccagagagtcctatccaccacagtgtgatgacagcattgaaccagattcaggatggtacactccacttcgtgcttgttttgtggttccagatccaaaatacaagaaatcaggcctcacatacatgcctaagtggcctgaacggttgcatgctacccctgaaagggtcacaactgttcatggttctagtactagtactttcagtcatgacaatggcaagtggaaaaagcgcattcagcactacaagaagttgctgcctgaacttggcactgacaaagttagaaatgtcatggacatgactacagtatatggagcttttgctgcagccttgatcaatgatcccttgtgggtcatgaatgtggtctcatcttatggtcccaacacactccctgtggtttatgatcgtggccttattggaaccttccatgattggtgtgaagctttttcaacatatcctcgaacctatgacctccttcatcttgatggactcttcactgctgaaagccacagatgtgaaatgaagtatgtgttgctggaaatggatcgaattttaaggcctggtgggcatgctatcattcgagagtccacttattttgtggatgccattgctactattgccaagggtatgagatgggtgtgtcgcaaagaaaacaccgagtatggagttgacaaagagaagattctgatatgccaaaaaaagctatggcactcatccaacaacggttcaagatgacaaactctggaacctgtgcagtggtgagagggggtggctacaattgtaaatccagaagcagaagcaaagggaaatggattcagagccaccatcaactaaacattgattcattctataatatagaagccaagaatcggtcgagttcaaatttatcaaatgaagaattggtaactcaataatctgatcttgttaagttatatagaaaattttcatatagatactattctttatatggcatcaattgtatcagctaccactctcctatatctattttttgttgttgttgttgtgtaatatccaagtgaattcatgtgagaaatgaaagttttaattccgacagaaagcatatgatatgctacctatacataaattggaattccgtaccagacaatactacaacattttgtattaatattcgcactctataatcatttaattcaatgtcgtattatacagattttatttatggaaagttagttattgaaa

SEQ ID NO: 99 - DNA, 1966 bp, Glycine max
tttggaatagtaacatatatgttaagtagaatttatatttaaagaaataatacgataaatctatattttatttttagtacaactccataagatccaaggtgaaatcaattttacaagataagatgcaacatggaatcagtttcactagaaatagcctaatttctgcaacgaaacagagcaagaactaaatatgaacacagaagagaccatgagagcttcaacaagacacgtagctccctatctgggaaatgacgtgaccaacttcttcgattaatccaatctttttatacggcatgctaccatcgtattaatggtcgaggacgccttcattgccacctatgttatgcatcctcttcaaactcacactcttcatacataattagatacattggttgcgcgctcttcctcgtttcctttgtctttctctttcggctttttccatcccttcctttctgcatgcagtgatgctgtgataaactgtgttagagcaacatcatggaacttttcaacatgtaatgattaagaaggaagatcattcatttaactgattaatggcactgatttccgagctactggctaacacaatactcttggtgatgaggcatttttctctacttagactggcatgcttgtttggtatcagaatcgcattaactgtcatatatacttggacggagttgatcggaacaacaattagcttccatgcaaacataatattaagaattatcacatggacatttgggcttatctccctgcctgcaagagttgtgtatgcctttcaaagggagaggcagctggaacaaaaactacatgaaatgcagatagagttggagaatttagtgtgggataagaaggaactacaagaacattttaaaatggctgtcaaagagcgcaaaatgatggagatgctactagtggagcttgaagaggagcatgatatggccattgaaaaaattgaaaagttagagggaaagttgcaggatcagacaaatgaaaatcttcggctgaaagaaattcaaggaaagagatactggagctccaaagatcaaagcaacagcgacagagtccaaaccatcaatgacagcaactacaacatttctcatcctatactctcactgaactccaactacaacgggagtggaatctctcttcaggatcttataatgtgcaaagatatttgggaagatgagagcaaaaccagaagtgagttgcttaaactcttaaaagcagtaccaaagtccgggccagtagttaagtccaaaacgagcgaagcactagactaccatcgagacgtagctctttcacaatctctcttcagtgccattatgtcacttgtggttggagtcactgtgtgggaagctgaggacccttgcacgcctcttgtggtggctctctttgccgtagtaggcatgtccttgaagagtgtggtgcagtttttctccaccattagaaataaacctgcatctgatgctgttgctcttttaagcttcaattggtttattcttggcactctaacctaccctaccttaccaagggttgctcgcatgctggctccactagtgttacgccttatggaccaaaccatgacacctggttcggtctcctttccatagcttgacactgcttttttcttttctgttgtgttatattatgtgctgtataatctgaattttgtgtccttttttactgtggtgtgcgtttcttattgcttgtacaatacgaggaatctctgtaatttagttgtctgtgttgtgatattctgttttttctgtttccagctcacaaacatgaaagggagataggaaatcagtttttgttttcttcaccattttttcagagttcagtgagctattgtttttgttaactttgatcaatgttctgctggattatttaaggatcatgcaggttcgatatgtttacttatatagatatagagatatatacaaagggagagaagaaggaaaaa

SEQ ID NO: 100 - DNA, 1105 bp, Glycine max
agcactaattgtcactatatatatactagtaccttgttaaactcacctacaatacaagcacactgcacacacattcagtcataacgtaaaatatgaaattagacactatcttcgcctttatcgtagtttatattctgctggtaacctcatcagagttccctagtgttgctgcagatgatgttagcagcatcatcagtgcttcccaatttgagcaattgctgaaacacagaaacgatcaaatttgtgaggggaagaacggattctacagctacaatgcttttgtcactgctgccagaacctttgatgggtttggcactacgggtgatgttaacactcgtaagagggaggttgcagctttcctagcccaaacctctcacgagaccacaggaggaggaggatggcctaatgccccagatgggccatatgcttggggttattgctttgtcacagaaagagataaatccaataattattgtgaaattagcaaggcaccatgtgcctcaggcaaatcatactatggtcgaggaccccttcagctgacacacaactacaactatgatctagctggaaaagccatacattcagacttgataaacaatccagacttggtagcccaagacccagtggtatcattccagacagctatatggttttggatgacatcacaagccaataagccctcatgccacgacgtgatcaccaataggtggaccccatcttctgtcgacatggcagctaatagagccccaggttatggtgtgatcaccaacatcatcaacggtaggattgaatgtgggaatggtccttctccagcctcaaatgacaggatcgggttttataaaaagtattgtgagatttttgggctctcagatgctaccaacttggattgcagtagccaaaagtcctttgatcaagattaagttggactccttccttgcttataattgccttagttataaatcccggaataagaataagaatgttggtccttgtgttgattttaaataaatttgtctattctgtgttgaatgattaaaacatttttgttcaatcatttctgagtgctatagtcttaaaagctgagatgcttaatccttcctctaaa

SEQ ID NO: 101 - DNA, 2595 bp, Glycine max
atggcggacactggcggcggcgacgacaatggcgttacctatctccacggcgacctcgatttgaaaatcatcgaggcgcgccacttgcccaacatggacatcttctccgagcgtctccgccgctgcgtcacagcctgcgacactatcaaattccactccgaggctcccgccggcggcggcggagccggccagcggaagcaccaccatccgaggatcatcacgagcgatccgtacgtcaccgtttcggtgccgcaagccacggtggcacgcacgcgcgtgctgaagaactcgccgaaccctgtgtgggaggaacagttcaacatcccgctcgcgcatcccgtggtggatttggagtttcgcgtcaaggacgacgacgttttcggcgcgcagaccatgggaacggtcaaggttccggcgcggcggattgccaccggagcgaagatttccgagtggtttccgattctgttgccgtccgggaagccgccgaagccggacacggcgctgcacgtggagatgaaattcactccggtgtgggagaatttactgtaccagcgaggcattgcggcggatcccgaacacaacggcgtgaggcacacgtattttccggtgaggaaggggagttcggtgaggttgtaccaggacgcgcattgtaccgaatctggtgaagggaagttaccggagattaagttggagaatggaaatgtttatagacacgagaagtgttgggaggatatttgttatgctatatctgaggctcatcacatggtgtatttggtgggttggtcgatttatcataaggtgaggctcgttagagagcctactaggccgttgccgcgcggtggcgatttgacgcttggtgagttgcttaagtataagtctgaggaaggggtgagagtgttgttgctggtttgggatgataaaacttcgcatgataaggttttcctcaagacggctggtgtgatggggactcatgatgaggaaaccaggaagttttttaagcattcttctgttatgtgtgttctgtcgcctcggtatgccagcaataaaatgagcttcttgaagcaacaggttgttggaacggtcttcacacaccaccaaaaatgtgtgattgtggacacacaggctgctggtaataaccggaagataactgcttttataggaggtcttgatctatgtgatggtcgctatgacacacccgagcatcgtctgtttcgtaatcttgacgatgtatttgatggtgatttccacaatcctacattttctgctggaacaagagttcctagacaaccatggcatgatttgcactgcagaatagatggacctgctgcatatgatgttcttattaattttgagcagcgatggagaaaagcaactaagtggaaagagtttgcgatccttttcaaaaaatcctctcaatggcatgacgatgctttaataagaatagaacgcatctcatggatattaagtccttctggtgctgctaccttaaaggataaatcggatgattatactgttccagaggatgaccctttagtatgggtttctagtgaagatgatcctgaaaactggcatgttcagatcttccgctccattgactcaggatccctgaaaggatttcccaaacgtgttgatgttgctctgtcccagaatcttatctgtgctaaaaatttggttatagacaaaagcattcaaacagcatacattcaagcgatcagatctgctcaacactttatttatattgaaaaccaatacttcattggatcatcgtatgcatggccagcttataaagatgcaggggctgataatctcatcccaatggaattggcactgaaaattgctagtaaaattagagctaaggagagatttgctgtctacattgttttaccaatgtggccagaaggtgatcctaaaactggggctatgcaagaaatcctcttttggcagggccaaacgatgcaaatgatgtatgatgcagttgctagagaattgaaatcaatgcagcttactgatgtgcacccacaagattacctcaatttttattgccttggtaatcgggaacactttaatgaagatagttcaagcacaaatggtgcacaggtctcaacagcatataaatatcgccgttttatgatttatgtgcatgctaaagggatgatcgtcgatgatgagtatgttataattggatctgctaatataaaccaaagatctatggctggtactaaagatactgagatagctatgggtgcatatcaaccccattacacgtggtcagcaaagaaaagacatccacatggccagatttatggttacagaatgtcactttggggagagcatcttggcatgttagatgaaacttttgaagaaccagagagattggagtgtgtgcataaagtgaataaaattgcagacaacaattggaaattattcgcttctgaagatttctcacttttgcagggacatcttcttaagtatcctgtacaggtagattccgatgggaagattagatccctacctgactgtgagaatttccccgatgccgggggtaagatactgggggctcactccacgacaattccagatatcctaacaacttaa

SEQ ID NO: 102 - DNA, 219 bp, Glycine max
atgcggaggaggctaggtaagtcgaaagatggttattggttcaaggacgcaaggtgcccctgctttttcagggtaataaggggtatagaaaatgcctcgagccaaagttcgagtaccgggtgctacagtgctgaagtaatccatgccatattcctaggaaaagctcgaacgaccttcaacaaatgggtacttgtactcgaaatcgacacaggtggatag

SEQ ID NO: 103 - DNA, 219 bp, Glycine max; identical to SEQ ID NO: 102

SEQ ID NO: 104 - DNA, 1707 bp, Glycine max
gttgtgactcaaaactgagtgaggagactgagaaaacagaagaaaacaaaatggaagacacagtttctgcgttgaggtctttgatggtttctcactctccgccgctggatgccttagtggtgccctctgaagattatcacctgagcgaatatgtgtctgcacgagacaagcgccgcgaattcgtttccggcttcactggaagtgccggcttggcacttataacaaagaaagaagcactgctgtggacggatggacggtattttttgcaggctgagaaagaacttagtgctgggtggaagctaatgcgaattggtgaagatcctgctgtagatatctggatggccgataatttgccaaaagaagcatccgttggggttgatccctggtgcatttcaattgatactgctcaaagatgggagcgtgcttttgccgaaaaacagcagaagctggttccaacctcaaaaaatttggtggatgaagtttggataaatcgcccaccggcagagataaatgctgttattgtacatcctgtgaaatttgcaggtcgctctgttgcagataagttgaaagatttgagaaaaaagcttgtacatgagcaaacccgtgggattattttcacagcacttgatgaagttgcatggttgtataatattcgtggaagtgatgtggcctactgtcctgttgttcatgcatttgctattgtgacatccaattctgctttcatttatgtggacaaacaaaaggtttctgttgaggtacaaactcatttagtggagaatggaattgaaattcaagagtatacagccgtaagctctgatgcgacattgcttgcaactgatgagctagatgctgtatctactgccaaggctgctttagccgaaacagaggccagaaaaattcccagtgaaattgataagagtgtaaatggtgaacatcaagcagaagaaaatagtaatgacctcatatgggctgatccagtttcatgctgttatgcactgtatgcaaagttgaaccccgatacagttctcttgcagcaatcacctttagcccttgcaaaagctttaaagaactcggtggagttggatgggttaaaaaaggcacatattcgggatggtgcagcagttgtgcaatatcttgtctggctggataagaagatgcaggatatttatggagcttctggttactttttggagaaggattctgtgaaaaaggagaaacatttgcaatctttgaaattgactgaggtgactgtaagtgaccagcttgaaggttttcgagcatcaaaagagcatttcaaaggattgagtttccccactatttcttcagttggctcaaatgcagctataattcactattttccaaaggcagaaacatgtgctgaacttgatccagacaaaatttatctttttgattctggagcccagtatctagatggaacaacagatattacacgaacagttcattttggtaaaccttcgactcacgaaaaagcgtgttatacagcagtcctaaagggtcacattgctcttggaaatgctagatttcccaatgggacaaatgggcattctcttgatattcttgcccgaattcctttgtggaaggatggtcttgattatcgacatggtactggtcatggaattgggtcctatctgaatgttcatgaaggttttgaggaactatcactatttctttattgcttattttgat

SEQ ID NO: 105 - DNA, 1585 bp, Glycine max
tgcatgtgattcacctcagcagactaagctgttctattgatgatttgtctcgtgatcctaaacaattataaaaactagtactcctatgtactaagtaatgaattatttcttcttttcttgacagttaatttaatatgcccgcattgctggacctgtctgaagcatctcctccataaaacttgaatcacattggtcaaggcactggggtttgtttggcatgcctcaatcctcatgcaaatagcactttggtttccgtgactgtctttcagagagaatcttaaattctactacaacggttcagttgtattattatatttaatctccaacagtatacatattatatactgacgattctgatatgggagtgtgagaacagagtagcagagagtgtttctcaaacaaacaaggttgtctctgaagttgttgcgaaaggaggatcttcttgcctttgcttgagagagttcttttttgttgtcttcctatacaggacagaaagtgttatggtatcttcggttcattctcacagcaattggaagcataatgtgaataatgacatcatgtctatatattgagctatgcggaaagttattatggtaggaaaattcgacaaactaaagctaaacagtggtaactaaaatggaggtgaagtgataccataaaaatgcatgcctgaacattccaacaaaagtagttaaggtacactagctgaactgatctccgatggagaagcttattaggccatgcgataaagaatacatgagaattaccatgctaaaacaccaagacactttcaaagaacaggtgtacgaacttcaccgtttgtatcggattcagaacatattgatgaaaaatatggaagccactagaggtaatgaagtaaatcaacgaggatggaacttaaaaaacgtgattagtttaactcaaaatggttatcataaaggcgcgcagcaaaatcctaagttgaactttgatcttgaaagacctgctaaggaggacatggcagaagctgacagcgatggagttctggaggttataaatgagactgagattgagctgacactaggcccttcaagttacaaacgtaaaaaagtggagacaccactaacttcagattcggcacataggttgtcttcttcttctactggatctagccttataaacaagacaagattgaagacccgtcatagcagttattcagctgcagaagaattaagtggaggcttaattggccttgtccatgtgcgacattcgaccgcagggtgccaaagtggaattagaaggagttatgaaattgaagaacgatcaagagatgagagaacgaaacagccaccttggttttttcaagtattgagtctgaacacgaactaaaaatattctaaggtcaatgtgatgtatattcgattactgtttaagactaactttgtgaatgatgtttctgttaaattttcttcttagttaccaagtgttgtgagggtatgatgatgtcttgtatagaagttacttgttttcatggttaaacaagccaattataattccggaatcacatatgactgatatttctttggtcttgtgactattcatattt

SEQ ID NO: 106 - DNA, 1076 bp, Glycine max
aagttaggattttcctcatttcagctaaacagtggtaactaaaatggaggtgaagtgataccataaaaatgcatgcctgaacattccaacaaaagtagttaaggtacactagctgaactgatctccgatggagaagcttattaggccatgcgataaagaatacatgagaattaccatgctaaaacaccaagacactttcaaagaacaggtactaaatctctttctgttactttgagccatttgtcctcaatcagtgtcaatagagtcttgagtgccctgagaatgttttcaggtgtacgaacttcaccgtttgtatcggattcagaacatattgatgaaaaatatggaagccactagaggtaatgaagtaaatcaacgaggatggaacttaaaaaacgtgattagtttaactcaaaatggttatcataaaggcgcgcagcaaaatcctaagttgaactttgatcttgaaagacctgctaaggaggacatggcagaagctgacagcgatggagttctggaggttataaatgagactgagattgagctgacactaggcccttcaagttacaaacgtaaaaaagtggagacaccactaacttcagattcggcacataggttgtcttcttcttctactggatctagccttataaacaagacaagattgaagacccgtcatagcagttattcagctgcagaagaattaagtggaggcttaattggccttgtccatgtgcgacattcgaccgcagggtgccaaagtggaattagaaggagttatgaaattgaagaacgatcaagagatgagagaacgaaacagccaccttggttttttcaagtattgagtctgaacacgaactaaaaatattctaaggtcaatgtgatgtatattcgattactgtttaagactaactttgtgaatgatgtttctgttaaattttcttcttagttaccaagtgttgtgagggtatgatgatgtcttgtatagaagttacttgttttcatggttaaacaagccaattataattccggaatcacatatgactgatatttctttggtcttgtgactattcatattt

SEQ ID NO: 107 - DNA, 252 bp, Glycine max
atgataactactcatacgtctacgaacctgagtcttgaaactgttttaggcataagcataaaagaaaagcatggcgatatgggcaacaagcgaggccttatctttgtgttgaatggaattctaatcgaagccagcttgtttaagacgcttccagatctcttcgtcttcgggaggaggggttctcgaagcaggtgttgcggaatcaggagtgatcggtatcgccatcgccgatcaccggcaccgcctcgctaa

SEQ ID NO: 108 - DNA, 252 bp, Glycine max; identical to SEQ ID NO: 107

SEQ ID NO: 109 - DNA, 1692 bp, Glycine max
attaatctctctcttcaatcttcatcctctcgatccgtcttctaattttccagtcaagtgccctacactacatcacatcaaattagtagtaatttcaagaaagatcatggaaattgcgtacaactactacttgcctgaacttcaggaaattgaggatccaaccttctttgatcaataccagatggattcatttgcttgtccacttgatgactttgactttgagtctttctccggttcccctgagagcaactcctcatatcatttcaactccgaaagcacaccaaattgtttcccagctgaaagtcatgatcagtcttttacccctgcaagaccaaccaagaggctcaagaacacttgtgccagtgacttcatttcccacaaggtttctgctttttcatcctcccaacttatttcctttgggcacttcaatgccccgtcaccatcacatgcttcccagcaatttcaaaacctggacttcgatgagaaagcgtctagtgagaacatggattttgcagctttcgtttctcagggttcgtatgaggacaaaagtttcctaagttctgataatagaacgaaccaggttggcataaccactaggaacccaatccaagctcaagagcacataatagctgaaagaaaacgaagggaaaatatcagcaagaggttcatcgctctttccgctatcctccctggcctcaagaagatggacaaggcttctgtgttgggagatgctgtcaagtatgtgaaacaactacaagaacgtgtgcaaactctggaggagcaagcagcgaagagaacacttggatcgggagtgctggtgaaaagatctattatcttcgctgatgatgaaacttctgacagccactgtgagcattcactccccgaagtcgaagtcagggtttctgggaaagacgtactcatcagaactcaatgcgacaaacacagtggacatgctgcaatgatactcagcgaattagaaaagctttacttcattgtccagagtagcagctttttgcccttcggcaatagcaaaactgatgtcactattattgctcagatgaacaaggaaaactgcatgacagcaaaggatctcctaggaaggttgcgacaggctttggtcgggcataactagttcaaggaatttatgtctatgatgtgcatgattacaagaataagtttagtcaataatgatttttatcgcagtgctttatttttcctttttcgtccatgatgtggattctggagttacatatcaagggcctgcgagtatctgtttacataggacttacatggagttgttcattctgctgtgaggtgtggggagtttcaacagaaacaacacatgatgccaaagtgttttttttctgttgctttttgcgtagttgattggtcggctatgttgccctacaccagaatagcattttcaaatctcagtagtttttttccctctcattaagaaggatttttgagaggctttgacttatagatcacctctttcttctctgtttccctgttgtgaaaaagggttccggtttgatagaagctaaatgccgagcacttatttaaatttgtttctcttgtcgttttgtgttctcttacttctctataaaattcttctggttgtaatagcgacaagttgattttttttttcttttttaaaatatatattgtatggtttggttgcagatcttt

SEQ ID NO: 110 - DNA, 1979 bp, Glycine max
tacattgcagcgaattgaatgattgactatacctctataaagagggcatgaaggtgatactcataataatacaacatccacaaatatggagaataataacacatcgatggacgcatcagaagccagctggttatctgatttgctgttgcaggaaacggaggatggttgcaacttgttccgacaatgtcaccttgagacgttgctcgacgatgatgaagagttgctttcgcatgagatagcaagtgcctttgagaacttgcagcaacctttgtcttcggagagtaacacttcgtattcggaggctccgatgaactcattcacggaagaaacaagttttgagaagcccatcaagcagcccaaaacgaatgcctctagttggaactcatcgttcactaagcatttttcgttatcttcatccccttcttctccaacctccaagatcctgtctttcgagaactcaaactcgtcccctcccaatcccaacaacaccgatcagtttcatggtattgttgtttcttctgccttaagcccaaagcagatcaagaccaaaggtgcttcagtttcactcccacatacccggaaacgtttatcagaaaaccagaactttgaagctgaaagccccaaaggccatagaagctacaagtccccatctcacgttcgggatcacatcatcgccgagagaaaacgaagagagaagctcagccagagcttaatcgctctagcagctcttattcctggcttaaagaagatggacaaggcatcagtgctgggagatgctataaagtacgtgaaagagctccaagagcgtatgagaatgcttgaagaagaggacaagaatagagatgtggagtctgtggtgatggtgaagaaacaacggctgagctgctgcgacgatggttcagcttcacatgaagatgaagaaaacagtgaaagactcccccgcgtggaagcgagagtgttagagaaggacgtgctccttcggatccactgccaaaagcaaaaggggcttttgctcaacatacttgtcgagattcaaaaccttcatctcttcgttgtcaatagcagtgtcctacctttcggggattccgtacttgacataaccattgttgctcagatgggaaccggctacaatttgaccataaatgatcttgtaaaaaacctacgcgtggctactttgaaatccatgtcataacaccaacgtgatcttgtctgtttctggtccagcaggatggtctggtggtgggtggtaatattaataatgatattttcatgttttgtggtgtgcagatacccaaaaatgattgaaaatgagttattgtttgaaggtaaaaaatttggtcctccagtctatttttaattttggatttgatctcccactaaattaattcacaaatattatttttttattttataaaatcatgtaatgttcgtcctccagtccacacttgaaccttaacgggttacaaggtgacgttgattattgtcacgtgtcacttttttattgaatgatgactttcacgtgtcatgttttgatgggtcaatgaaaacaacaatgtatttcatcttttatggaattaacatccacatgatacgtgacaatcatcattcaataagaaagtgacacatggtagtcaatgtcactttgtaacaatcaacgtccaattgtgggttgagggaccaacattgcatgattttaaaaagtaggagaaaaaaaaattgtgaattaatttaatgggggacaaaatttgaaattgaagacaaactggagaatcaaaaatgtaattttgccttgattcaaatgctctcttgtcaatttgaatgcacaaaatttatatgtaattgaactttcatttcaaaatttacttctcttgatatttaatgcaaatatttattatatgaattgtttaaatgaaacttcaattttaatttaaatgttattaatcgaatgatatctctggtccccacctattaattttgac

SEQ ID NO: 111 - DNA, 5159 bp, Glycine max
ttgccttgaaaaatgagacgcaaggttgtcagaatatgcatgtttgtgtaacaaaaggctttgcaaatagtatgttgctgatgatgttctcttttagtatattcctatagaaattatatgccacatcagatgttaacaaagtgtagagcgttttgtaataaaattgtagtgtgtgcgctttattcttaattcttaattaatgctgatgactgacagtgttggtcacactgggaaacatatttttcttacagaaatagtgcaatctgaagtaattcattgcacatatctatgctgtgatgaagataatgttatgctagcttttgtgaaaaaaataagaataaatgtataaaagtggcttccttgaggaccaatccctatggaggtggtgatgcagtttgtggtaatgcattggaacctctggtgctgcattcttttgggatatcttcagatatcttgtatttctcttagttcaggacatcacttgaataggagtactggcttagaaaattggttgggttattctgggtcacttgtgggagatgattctctactctatgattctgcatttgtcgaaacatcaacttcgtcattcccattgaatgagtcagtctcttgtgaggacttggaaggtgtaggatcttttaataccacgtgcttgctaagctcaactcattatttaaaatctgatatttacatttatggtgttggaaacctggagatactctctgatgtgtcacttttatgtcccatggaagggtgtatgataacagtcaatgtatccggcaacgttaaacttggtcaagatgcatccattgtttctggctctgtggttttatctgcagccaatctgacaatgggatacaattcttatatagactcatcatctttaggagggtctccaccttcccaaactagtggcacacctgttggcaacgatggagctggtggagggcatggtgggcgtggtgcatcttgtttaaaaaataacaagacaaactggggtggtgatgtttatgcttggtctacattgtctgaaccatggagttacgggagcaagggtggtggaaaatctactaaaaaacaatacggagggaatggtggggggcgtgttaagcttctagtgaaggacactttatatgtaaacggatctattactgctaaaggaggagatggagggtctgatgggggaggtggctctggtggaagtatattggttcatgctgtaaagctgaagggctatggtatcatcagtgccgctggtgggacgggatggggtggaggaggtggaggaagaatatcacttgattgttacagcatacaagaagatttaaacattactgttcatggaggtttgagtattggctgtcctgggaattctggagcagctggcacatatttcaatgcacatttactaagtttaaaagttagcaatgacaatgtcacaacagaaactgagactcctttgcttgatttctcaaccagccctttatggtcaaatgtttacgtggaaaataatgcgaaagttttggttccacttgtgtggtccagagttcaggtaagaggccaaattagtgtatacagtggaggaagcttaatctttgggttgtctgattatccaatttctgagtttgagcttgttgcagaagagcttttactgagtgattctattataaaggtttttggtgcatttagagtttctgttaaaatgttactcatgtgggactcctcaattcaaattgatggtggtgaaagtactgttgtgactgcttctgtacttgaagtgagaaatcttgctgttttaaggcaaaattctgtcattagttcaaatacaaacttggctttatatggtcaaggactactgcaattgactggtgatggtgatgcaatcaaaggccagcggctatccttgtctctcttctataatgtaactgttggtccaggttctttacttcaagctcctttagatgatgatgctagcagaggctcggtgacaaaacatctttgcgacacacagagatgtccaatagatttgataactccacctgatgattgtcatgtcaactatacactctccttctcacttcaaatttgtcgtgttgaggatcttcttgtaaatggcattatgaagggaagcataattcacattcacagggcaagaaccgtgattgttgatactgatggtatgattactgcatctgaattaggttgcactgaaggtattggtaagggaaactttttgaatggagctggtggtggagctggacatggtggaaaaggagggtctggatatttcaacgggagagagagtattggtggtagtgaatatggaaatgctattcttccatgtgaattgggcagtggaaccgagggccctaatgagtcatatgggcatgttgttggaggcgggatgattgtgatgggatctattcagtggccacttttgagactagacctttatggatccttgagggctgatggtgaaagctttagcaaatcaataaaaagcagtgatggttcttcggttgggggtcttggtggaggttctggtggaacagtccttcttttccttcaagaacttcggctcttggagaatccatacttatctgttgtagggggcaatggtggccctgttggtggtggtggtggaggtggaggtcgaattcatttccattggtcaaagattggtatggaggaagaatatgttcctgttgcaagtattactggctccatgaataacagcggaggtgctggggacaatgatggccgtcatggacaggagggaactataactgggaaagcatgccctaaaggtctttatggaattttctgcgaggaatgtcctattggtacttacaaagatgttgatggttctgatgaacatctttgcattccttgtcctcttgatcttcttccaaatcgtgcaaatttcatatataaacgagggggtgttacaagacggtcttgtccatataaatgtatatcagacaaatatcgaatgcctaattgctatacacctctagaggagctcatttatacatttgggggtccctggccattttcagtattgttgtcattcattttattgcttctggctctgctgctaagtactttgagaaacaagttgattggttctggttcatatcatagttcaagttcaattgaacaccataatcatcaccgtttcccgtatcttctttctctttctgaggtccgtggagctagagctgaagagactcaaagccatgtacacagaatgtactttatgggacctaatacttttagagaaccctggcatcttccttactcacccccccatgctataattgagattgtgtatgaggatgcttttaataggtttattgatgaaatcaactcggttgctgcatatgattggtgggagggatcagtgcacagtatactttctgttgttgcatatccttgtgcttggtcctggaagcattggcgacggagagtcaaaattagtcgccttcaggaatatgtcaagtctgaatatgaccattgttgtctacgctcctgtcgatcacgggctttgtacaaagggatgaaggttggggcaactccagatttaatggtagcatacattgatttttttcttggtggtgatgagaagcgattagacattgtatcaattatacagaagagatttcccatgtgcataatttttggtggggatgggagctacatggcaccttataatcttcacaatgatacactgttgaccaacctccttggtcagcatgtcccagcaactgtttggaatcgcttggtagctggactcaatgctcagttacggacagtaaggcatggatcaattcgtactgcactaggtcctgttgtcgattggataaatagccatgcaaacccccaacttgagtttcatggagttaaaattgagcttggatggttccaagcaacagcttctggttactatcagcttggtatcgtggtagcagttggggattatacccttcttgatttgcaccagtctgatacttgggttggcacagatgaattaatgaggaaaaatgtggcacatggaagaaagaatgttaagcagctgcagcatagttggccatacataagcaattcattatctcttaaaaggataactggaggaattaatggtggcctaataaatgatgctaccttaaaatcattggactttcgaagggactttttattcccactttctctactattgtgcaatactagacctgttggtcgtcaggacactgtacagttgctgattactttgatgcttttagcagatctttctgtcactctcctcatgttgcttcagttctactggattgctcttgcagcttttctttctgttctactcattcttcctctctctctactttctccatttcctgctggcctgaatgcattattcagtaaagaacctagaagagcttcactttctcgagtatattcactgtggaatgctacttctttatctaatattggagtggcttttatttgttgtctccttcattatgcactatcccactttcaccaccctgatgagacaagcacacgtaatgttaagagggaagatgataagtgctggcttttgcccatcatcctttttctattcaagtcaatacaggcccgttttgtgaattggcacatagcgaatctagaaattgaagatttttctctattttgtccggatccagatgctttttgggctcatgaacctggtttatgacaaaacaaacattgtgaacctggtttgtgacagaaaagaaacagaagcattagaatgtgaacctggatgttaagtttttggtaaatccaacagttcaaaaggatgcttcatttcggcgtggaacagcagccttgcctgtgaatatatattcagagatgtacaggagaatgaagtacagttctgcactttttcgcttctttgtaaaaaaatctctagaggttcaagggataatagttacacgaaatacacctctttctagtattgtcttttaatttagatttttttggggactctcatgattcataccactgaagcttcaccacttcctcctttgtctttgtatttcatcgtaaattaaagcaaattttgcagacatgagttttacatatattaaatgacatcattatagaattttatactaaaa

SEQ ID NO: 112 - DNA, 2477 bp, Glycine max
ttcagtttacaatttgtgcacttttgtgtgtcgttttggccaattcatcctctccctcatttatgccttttctccctaccataacaaaaaacccaacccaagtgttgtaagtctaattaatttccattatcgcgtgaattgcacattccttgttttgtcccagcaatgggaagccccaacacaagaaccagctcctcgtctgattccgaactcccttgctctaattacattccggtacccgatggaccccactctcccgcagaaccagctcgaagagaggtgattgtaatcttttgtgggttgctggtgcttgtgtccttggtggctttcaatggttacagctgggcgcattcaaatggacatgatggagatcatcatcatgcgtcatcatcattgccaacaacgttgttaacagtaacacccaatgaattggaactgagccccgacacagtgccatggtcaacatggcagacgacgctttcacgtggcgtgtctgcaggggtctcggagaagtccagctggctattcaacagcaacaatgggaacggggaatcgtatccttggaacaatagcatgctgtcatggcagagaacagcttaccatttccaacctgagaagaattggatgaacgatcctaatggtccaatgtactacaaagggtggtatcacttcttctaccagtacaatccaaacggtgcagtttggggtgacatagtttggggacacgctgtgtcaagggacatgattcactggtttcaccttccacttgcaatggtggctgatcaatggtatgacaaaaacggtgtgtggacaggctctgccaccatcttacccgatggtcaagtcatcatgctatacactggttccaccaacgagtcaatgcaagtgcaaaaccttgcataccctgcagacccctctgatcccctccttgttgattggatcaaataccctgcaaatcctgttctattcccaccacctggcattgatgccaaagattttcgtgaccccaccactgcatggatcacctctgaaggaaagtggcgcatcagtattggttccaagcttaacaaaactggcattgccttggtttatgataccaatgacttcaagacctttgagcgtgtggagggagtgcttcatgttgtccctggcactggcatgtgggagtgtgttgactttttccctgtatctagcaagggtgaaaatggccttgatacttcaatcaatggggagaatgtgaagcatgtggtaaaggttagcttggatgatgatagacatgattactatgcactcgggacttacgatgagaagaatgttaagttcacacctgatgacttcaacaacgatgttggtattggactcagatatgactatggtatattttatgcatccaagacattttatgatcagagtaaggggaggagagtgttgtggggttggattggagagtctgatagcgaatacgctgacgtggccaaaggttgggcatcagttcagggtattccaagaacagtggcacttgataagaaaactggtagcaacttaattcaatggcctgtggcagaggtagagagtttgagattgagaagcgacgagtttcaaaatttgaaggtgaagccagggtcagtggtgccactagaaattggaacagctgcacagttggacattgtagctgagtttgagatagataagaaggccttggagaagacaggccagtccaataaagagtataagtgtagcactagtggtggatcaactgagcgtggtaccataggaccttttggtcttctagttttggcagatgatgatctttctgaatacactcccacttacttttatgtcgtcaaaggaagccatggacaacttaaaacttccttctgctctgatcaatcaaggtcttctctagcaactgatgttagtaagaaaatctttggaagctttgttccagtactaaaagacgaaaagttgtccgtaaggatattggtggaccattctatagtggaaagctttgctcaaggtggaaggacgtgtgtaacatctcgagtttatccaacgaaggcaatctatggagctgctagattgtttttattcaataatgctactgaggccactgtgactgcttcagttaaggtttggcaaatgaattctgcattcatacgcccattccaccctgaccaaagcaattcattttaagggatgagggactcgcaagtcactaatacaaagcagaatttgttacatgcatgacacaactgttcaaagaagaatttgaacaaagcccactcgtccctcatttttgggtaggcttgattttgtaaactggctgctggaatgggagtcattaaatatcttgctcatatttggctaagcttgtaatgatgtttgtaattataatgaaagaactgtgatgcttctccaattcaataatgaaattgttacacaatattattgttcatttaataaataagaattattcc

SEQ ID NO: 113 - DNA, 1655 bp, Glycine max
tccatgtgaagtttccggtgtaaatgaaaaaccctaatcaagtccatcaaacggtcccaattgaaatcttccccattcgatccaacggcaacatttaattttgagaaaatagttggatttttgtatttattttattagtttctgaaagtgcccttttcagaaaaaggaggctttccatcggattccagtgtcgattttctgcttctgcatctgcataacccgttaataattgctgcaaaaccctaattccccaaatcgttgatgaaaggttcgaagcgtttggccgcgtcggaacccaaccagatcgataccaacgaaacggggggccgaaccatcccaacaaccaattgtggcagcaccaccattggatatgaaacgggcggagtcatcacagcagcatgtgagagctttaaatacccagtttgcaagttgggttcaaacacaactaaagaatcatcctgatgagctttgggaagatggtgtcagagattacttagatcatgcttcaagcattatggaaaagtttagtgatgttgtcaactggctcaaagcaaatgccactaaggcagaaaattcggctgctgatgctagtgctgctttttctgggaaaaagctcttgcctgaagtaataatcaatgaaaataaatcttctggagaaaaaactgggtctactcctgttagtactgctacaaattttactagttcttggagccctggattattttcaaacagtcaaggcatttttggaattggaaatcaaagttcggctatctctaatcagagtttgtctccctctaatcaaagtttggctccctttaacaacaatgcttcagatgatgtagatggtgaaaatgagttggagcagcctagcagcccatcagttaagaagtcagaagagaaaggtgtagtagttgtacatgaagtaaagtgcaagctttatgtgaagtcaagtgatccaggagataaagatgcatggaaagataaaggaatgggccaactgtctattaaatgcaaagagggtgtcagcaaggctaccaaagagtccaaacctacaattgttgttcgaaatgaggtaggaaaagttcttctcaacgccctgttgtatccaggaatcaaaacaaatctgcagaagaactctcttgttgcaatattccatacttcgggtaatgctgacggaagtggtggagataacgatagtgttgttgcacgtacattcttgatccggatgaaaacagaagatgatcgaaataaactggcttcaaccatcaaagaatatgctccaatgtcttgagagtacaagagtcatgattattgtgccaccttgagccatttaaagtaatcgaatacgggatccaccttcaatttttcctttcaccattttatttttttatgatgtcatttgttagattctgtgtttccaaaccttgtgtttggaggctgttgcttatgtaccatatgagaaggttgcatttggtcggataaaatgccttagattaatgcaattgtagtttaaagttaaaagtgatgcattcatcaccttggacctgccgtactattttttaaagccagccaaacggcagagaaaccgcatgtttacagaatttgaagacaaggtggaggactagaacatggttgtttcatatttagataaagtt

SEQ ID NO: 114 - DNA, 1338 bp, Glycine max
atgtggtcctccttctccaccttaataacaggaaacatcattcatgtttgcttttccacaaggaagctcaatagcctctattgtctgtctgcaggcactcacccctcctttgaaatgccaacttccgcaaacaataatagttctactattactcctggaattgatgaaggtaatgcaactactgaacccggtaagtttccaaatatccaatatctgattactactagtagtagagtagatatcaatgatagagatgagaaagttgcaaatgctgttaaggtcgttgaggaacaattgcagctccatcgatcctggaggtcaaagtcaagcaaaaactatgcaacttgtgatggtcaaggaatatatgtatatgatttgccatccaagtttaacaaggactcgaacttatttggctatttaagtaacgaggggttgggtgagcctatagccaagcttgggaaagggtggtataagactcatcagtactcacttgaactcgtatttcattcgagggtctcgaagcatccatgcagggtttatgatgaaaatgttgcaaagctcttttatgttccattctatggtggtttggatatcttgcgatggcatttcaagaacgtgtcaaatgatgtgaaggaaagtttggctctggaattggttagattgttagagcttgacaaaatgcaaaaacccattaagcttttgatcgaacgacaaccttggcatgtgaatgacaatggaatccctcatccaactaatttccacccgcattctgacaatgatataatctcttggcaactgaaaatcattagatcaaaccgcaaaaacctcgtcagttttgctggagcagcacgggctgattcagaggacaacataaggtcaacattgattgaccaatgcacttcattgggtaatggtaagtgccattttctgaattgtagttctgttaagtgtgatgaggcagagtcagttatagaactttttgtggagtctgagttctgtctgcatcccccaggggatagttgcattccggttctctttgatcccttcacagcttattaccaatatccctggcacttgtctcatgatcatgacaagtattctgtgttaatggacaaaaaagaggtggtacaaaagaatgtgaatgtggttgagaggctaaccaatatttcctctagagagagggaaaacatgagaaggtttattacgtatgaactgttgcctggattggtgtatggggattacaactctgagcttgacaggtttcaggatgcatttgccattacaatgaataatctgtttgagagggttagcagattagatgaagcacataaggattga

SEQ ID NO: 115 - DNA, 627 bp, Glycine max
atggcctcacaacaacacatcgagaagatgcagctccgccagaacttccgcaatctctggcactctgatcttttgagtacaattcaagctgacaccccttattgttgcttttctctgtggtgtgcaccgtgtgtatcatatctgctccgcaaacgagctctttacgatgatatgtcaagatacacatgttgtgctggttacatgccctgcagtggtcggtgtggagaaagtaaatgtcctgaactctgccttggtgcggaggttgtctgctgttttggaaattcagtggcctcaactcgatttctgttacaagatgaatttaatattcaaactacgcaatgtgataattgcattattgctttcatgtttgtccttcaacaacttgcctgcatattttctattattgctttaattgtgggaaatagtgaaattcgacaggcttctcaattgctatcttgtttggctgactttgtctactgcacggtgtgtgcttgcatgcagactcagcataagattgaaatggacaaacgcgatgggaaatttggaccccaatcagtaatgggtgttccccctgttcaacaaatgtcacgctttgatcaggcagtccccccttttgttgggtattga

SEQ ID NO: 116 - DNA, 1314 bp, Glycine max
gactagtccaatgtttttagtcgaggcaatgagctatgcatgttaaacttcgatcccagtctggaacaaaattacaaaattaatatttatttattttgagtcttacatttgacgtgtcacaccgaagaggttgagtgtaaggagcagcaatgctgagagaaaaggatgagaaatttgcaaatcaaaatacacaaggtaaaataatagttgaaataattccaagccggaccaagaaaagaaataacaatattcttggatttcatgcgaagtcagaaacagcaaaacaaatggagcagctaagcgaactagggactgattccttggttaaagctagagaaagttctttgttcttttgcgcaagtaagtcatataggccgaatatattagtgtcagcgagttgccattgcttgtcaatggtaatgtttcactaagaaaatttacaaaatggatgctgtagtcaaattatcaaccagagcttcatgccattggccgggaataaactccaacatcacaaagaggctagccatcaggctcccgcccagcagaacaaaatgcaacttgcacttacacaagatggagatacaacgacacagcatcaagaagaatgtcctaaacaaatcttgggatagaaatagagttttagccatggcatcaaaaagggaccccaaatctcagcaaaattctctctctccagcagatacagtagagcagtactacacaagcattaatgataaagacctgcgacaattggatgagtgcatatccgaagatgcttgctttgatgactatgccttcaccaaaccattccagggaaaaaaggaagtgatacgcttcttagaacagcttactcattgcatgggccggaatgtgacattcagactgaaacatatatacgagggagatgatttaactgccgtagcgagctggcacttggaatggaacgagaaacaaatcccattcaccagaggttgcaccttcttcaagttatcaaaattaggaaagaacctggtcatctggaacgctgaggtattaattgaatcacctatcaaaccaggaagcatagttttgaccctattgaaaaacgtgacttcaatatttgatgactttccgaaagtaaccgagtggttcttaagaagtcctaatgtaatactaacatggatattgagagtttacaatatatttgtcgcgccttggctacatccactcctagaaggctacataaagctatggggcttctttgttcgattgctcaactctgtaatcactgttgtgatttttatttccaaaactttcttcaagtaaggatcacactat

SEQ ID NO: 117 - DNA, 747 bp, Glycine max
acggcattcccttgccgacaatgcccgctaacacacctgacaccagaccatgatacccactgacaagaaaagtacacctaatcaaccacgcacaaccataagcctctctcacttctcttgttaaatcaattggaatcagattctttcttctgttctctccgtttcagttgctatggataataagaagagaggggcgagggagggtgaagatgaagatgagatgaagatggagaagttttacgcgctgttgaggaacttccgcgacgcccgtgatcgccggcgaagggagttggtggagttggaaaaacacgagagcaacatctggaagaagatgatgaagggcaccgccccaactgcaacgaaggacaataaggcagaagtttctttcgaatttcaggactttaccaccgagattcaattcagaaagccacctttggtttttcctaatccagtttcatcatgtgacactagcaaagacaacaacaaaggtaacaagaagaagaaacagcaggatcttgctctcgatctcaaactcgctctctagtgatgatcaccaatatcgaccttcaattgtatcagagttttctcaaatggccgcttatatatattattattcctgtgctaattaacgtcgtgtatatgatgcaatttacttcacaaatatctatcatctatgaagttctttatgtgttcccgtcataaaaaaaaagttctttaatgcatgattcgaccgtggtttatgacgaa

SEQ ID NO: 118 - DNA, 2655 bp, Glycine max
atggcggaggcagttcttgaagttgcactcgaaaagttgagctctctcattgaaaaagagctgggattattccttgatttcgatcgagacatgaaaaagcttcgcagcatgttcactacaatcaaggctacccttcaagatgctgtggagaaacaattctcagacgaagctataaaggattggctgccaaagctaaaagaagcagcttacgagctggatgatatcttggacgagtgtgcctatgaagcattggggttggagtaccaaggagtcaagtctggtcaatcacacaaggtacaatgctcttgcttatcctcttttcatcccaagcatgttgttttccgatacaaaattgccaagagaatgaaaaggataactgagagattagatgaaattgcagaagaaaggcagaagtttcatttgactaagacggctctagagagaactagaatcattgagtggcgccaaactagctcaatcatcagtgaacgacaagtctatggaagggaagaagatacaaaaaagattgtagacgttttgatggctaatgctgatgcttatcattctgagagtttattagtttatccaatagtaggtctaggcggacttggaaaaacaacacttgcccaactcatctttaatcataagatggtaatcaacaagtttgagataagaatgtgggtatgtgtttctgaagatttcagtttgaatagaatgacaaaagctataatagaagcagcatctgggcaggcttgcgagaatttggatctagacctgctacaaaggaaacttcaagatttgcttcgaggaaagagatatttgcttgttttggatgatgtgtgggatgataagccaaataattggcagaagtttgaacgtgtattggcttgtggggcaaatggtgcttctattttggtcactactcgtcttccaaaggttgcaacaatcatgggaacaatgcctcctcatgaattatcaatgttatccgaggatgaaggttgggaattgttcaaacaccaagtctttggaccaaatgaggaagaacaagtagagcttgttgtcgcagggaaggagatagtaaagaagtgtgggggagtgcctcttgcaataaaagcactaggaggaattttacgcttcaaaagaaaagaaaatgagtggcttcatgttaaggaaagcaatctttggaatttaccacacaatgaaaactccataatgcctgtcttgagattaagttacctgaacttaccaataaaactaagacaatgttttgctcatcttgcaatatttcccaaacatgaaataataataaaacaatatttaattgaatgttggatggctaatggattcatttcatctaatgaaatattagatgctgaagatgttggtgatggagtgtggaatgaattatattggagatcattttttcaggatatcaagacagatgaatttggcaaagttagaagtttcaagatgcatgatcttgttcatgatcttgcacaatctgttgcaaaagatgtttgttgcattacaaaagacaatagtgcaactacttttctcgaaagaatccatcatctctcagatcataccaaggaagccattaatccaattcagttgcataaagtcaaatatttgaggacctatataaattggtataatactagccaattctgttctcatatattaaaatgtcattctttgcgggtgctttggttgggacaaagggaagaattgtcatcttcaattggtgatttaaaacatctaaggtacttgaatctttgtgggggacatttcgttactcttccagaatcgctatgtagattgtggaatttgcagatattgaaactagaccattgttatcatctgcaaaaattgcctaataatttgatacaattaaaggcccttcaacaactatctttgaataactgctggaaactatcaagcttgcctccttggataggaaagttgacttccctaaggaatttatccacttactatattggcaaggaaaaagggttccttttggaagaattaagaccactgaagctgaaaggaggtcttcacattaagcatatgggaaaagttaaaagtgtattggacgccaaagaggccaatatgtcaagcaagcaattgaaccgattgtctttgtcatgggatagaaatgaagagtctgaattacaagaaaacatggaggagattcttgaagcgcttcaacctgatacccaacaacttcagagtttgaccgtgttaggatataaaggtgcttatttcccacagtggatgtcttctagtccttctctcaagaaattagtaattgtaaggtgttgcaagttaaatgtgttggcaagttttcaatgccaaacttgtcttgaccatttgacaattcatgactgtagagaggtggaaggtttgcatgaggctttccaacatttgactgccttgaaggagttagaattatctgatcttccaaacctagaatccttgcccaactgctttgaaaatcttcccttgcttcgcaaattgactattgtaaactgtcccaagttgacgtgtcttccatctagcctaaaccttagcagtctagaacgattgacgattgatgcttgccctgagttgaagaagcttacattccccatattagaccatgacgatgaataa

SEQ ID NO: 119 - DNA, 3325 bp, Glycine max
aaaattgttgcaaagtggaaagaagagagaaaaggtgcggtggtgttgagttattttgtttctctgaaaattcacagaactcgcacacacacacaacgcaaaaactcgctcccttcgcatcagatccgaatctctcttcgtttcgccgattcggatctccgtcttcgattccttctcctcgcaattggatccgatttgagcttctcgccgtacacaatcaccgtcaatcatgaacccgttttcttcaggaacgcgtttgagggacatgattcgggccatacgtgcttgtaagactgcagcagaagaacgagctgttgtaagaaaagaatgtgctgccattcgcgctgcaataaatgaaaatgataatgactatagacatcggaatctggctaagctaatgttcatccacatgcttggttaccccacacattttggtcaaatggaatgcctcaagttgatagcatctcctgaatttccagagaagagaataggttatcttggcctcatgttgcttcttgatgaaagacaagaagttctaatgttggtcaccaattctttgaaacaagatcttaatcacacaaatcagtatatagtgggacttgctctttgtgctttaggaaacatttgttcagcagaaatggcccgtgatcttgcaccagaggttgagagattgctgcaatttcgagatccaaatattcgcaagaaggcagcattatgctctataaggatcataaagaaagttccagacttggcagaaaattttatcaatcctgctacttccttactcagagagaagcatcatggggttttgatcactggggttcagctttgtacagatctgtgtaaaattagcactgaagctcttgaacatattaggaagaaatgcacagatggtttggtcagaactcttaaggatctagccaatagtccatattcaccagagtatgatattgctggtatcacagacccatttctgcacatcagattgctaaaacttttgcgagtgttgggtgaaggcaatgctgatgctagcgacaccatgaatgacatacttgcccaggtggctacgaagactgagtcaaataaagttgcagggaatgccattttatatgaatgtgttcaaacaataatgagcattgaagataatggtggcttacgtgtacttgccattaatatcctgggaagattcttgtcaaaccgtgacaacaatatcagatatgtggcattaaacatgctaatgaaggctgtaactgctgatgctcaggcagtacagaggcaccgtgcaaccattatagaatgtgtgaaggattcagatgcttcgattcggaaaagagcccttgaacttgtttatgttttggtgaatgagactaatgtgaagcccttggcaaaagagcttatagattatctggaagtcagtgatcttgatttcagagaggaccttactgccaaaatttgctccattgtagcaaagtattccccagagaagatctggtatattgatcagatgctcaaggttctgtctgaggctggaaactttgtaaaagatgaagtatggtatgccttagttgttgtgataagcaatgcttctgagcttcatggatatacagtaagagcattatacagagcatttcaaacgtcagctgaacaggagactctagttcgagttacagtgtggtgcattggggagtatggtgacatgttagtcaataatgttggaatgctagacatagaagatccaataacacaggtgactgagtccgatgcagttgatgtcatagagattgctataaaacgccatgcatcagatcttaccacaaaagcgatggctttggttgcactattaaagctctcttcacgtttcccttcatgttcagagaggatcaaagaaattattgttcagttcaaagggagctttgtgctagaattgcagcagagggctattgaattcagttcgattatttcaaagcatcaaaatattaggtctacacttgtagaaaggatgccagttttggatgaggcaacttacattggtaggagggctgggtctctgccaggcgcagcttcaactccaactgcaccttcatttaatcttccaaatggagtagccaaacctgtggctcctcttgtagatctacttgatctaagttcagatgatgctcctgctccgagctcttctggtggaggagatattcttcaggaccttcttggtgttgatctgtcaccagcatcacaacaatctgttgctggccaagcttcaaaaagtggcaacgatgttcttttggatcttctgtctatcggatcaccttctgctgaaagcagctcatctacagtagacatcttatcctccaattcgagtaacaaagcaccagtttcttcatcattggatggtctctcatctctttcactttcgacaaaaacaacttcaaatgctgctcctatgatgaatttattggatggttttgcccccagcccgccaacagaaaacaatggatcggtttatccatcagtaactgcatttgagagcagctccttgaggttgacattcaatttctcaaaacaaccaggaaacccacaaacaacagttatccaggctacttttatgaatttgtcctccaattcatatacagattttgtttttcaagcagcagttcctaagtttcttcaattgcacttagatccagctagcagcaatactcttcccgcaaatgggtccataacccaaagtttgaaaattactaatagccaacatgggaagaaatctcttgtcatgcgtataaggatagcatacaagataaatggcaaggatacactggaggaaggacaagtcaataactttcctcatggtttatgaagcccaatgatcaggggtcattaaggtgatgcacaaaacccatcgttttccccagcactccataattattggtgcggttttcatgtttcattccttcaattgaggaaggtatggttcgaccatctggaccactttttggcttaaatttgaagtcgatttggtggcttcacatctttgttttacctttttcttttacttaggtgatttatgtacattagtacaacatattcctgtatgaaaatgccatagtcaaatttttcctctcaagccactgagagttgtgtcctattgagtacttgaagtgctttcttgctatttttttggaggtagtcgctcggttttgctgtctaaagttatagtgttgttgaatgcaatttggtatcttttagacgattgatatatttgattttatgtaatgtttccccctcaagattaatgaaatgtaatctcaaaattatatcaactttcttgttc

SEQ ID NO: 120 - DNA, 1985 bp, Glycine max
gtctctctccatttcttatgcaacacccactccttcttcctatattctattcataactctcatcattcattcattcattcgtcattcatcttccatcatccatccactttcctcaatcttccattccagatctctcaccttcttcttcttcctctgtgccacccttttgttccatgattgttttttgtgtctgtatcagcttgatctttttgtttttttccttgttgtaaaaacatttcaatctgcaaggaaacagttcagagatattgttgttggagctcaatgtatctgctctgtgagcgatccatgtttggggttaaaacaaattttatgctggctgtcaagggcttaacataactgttctcctttatttgggtttgagactagctatgagactgtaggtggagtgaagatgaatgtgtgtccacaaaagaaaggataagatacgaaatgatagtatcaaggagatattcacatgacagttattgaggaaaagaagatcgcaattcatttaatgtgatctggacacgtgccaagaagtccactcgaggcattggggaggagagtagatgacacggtttttagccttttgtgaagtggtaaagagagatctaaaaggacattggacaaaattattgaaagggatttcatgataattattggcagcttcactaatatcttttaagactacatactttagctaggcaatcacatttcttgggataatgttgggaggcaacaacggaaattgcttgcttcctgttttcttggacgaaactcaatttcagcatcaaactaatgtgtcaaatcaattgcagttgtttggaaatttacaagctggatgtagtgttgacccagttaattactttggaaatgagcatatcagctccatgattcagcctaataaacgaagcaaggaaatggaagatatatcaaaacaaaggcttcagatttccttaaactacaatgttcatcaagatgatgctgaacgattagcaagtattccaaatcctaaccccgtgtcaacaggattgaggctttcatatgatgatgatgagcgtaactcatctgttacttctgcaagtggaagcatggctgccacaccgtctatcatattgtctcttggtgacaatatcagaactgagcttgataggcagcaagaagagttggaccagtatgttaaacttcagaaggaacaactgtcaaagggagtgagagacatgaagcaaaagcacatggctgctctccttacctccattgagaaaggtattagcacgaagctaaaggaaaaagacgtggagatagaaaacatgaaccgaaaaaatagggagctggctgaaagaataaagcaggtggctgttgaagtgcaaagctggcattacagagcaaagtataatgagtcaattgtcaatactttaaggaacaaccttcagcaggcaatctcacaaggagctgaacaggggaaggaagggtttggagacagtgaagttgatgatgatgcctcatatatagatcctaataacttcctgaacattctggctgcgcctataaactctactcacaagagctaccaagatatggagaatctgacttgtagagcatgcaaggtgaagacagtttcgatgttgttgatgccttgtaggcacctgtgcttgtgtaaggattgtgagggatttatcaatgtttgtcctatatgccaattgataaaaactgcaagtgttgaggtgcatctgtcttaacttacaaagaacgggatataagtcactgttttctttgtgatttatctgcctaatttcttaatgttcagctcaaagtaatttgtctctataacaaaaatcgactatatctaaggatattattatgtcctctttctcagtgacttttacctgattattgatgatgacattcatattattactatcatgatgaaatagagaaattggggaatataatgagaagtatgaaatggaatttgtattgtttcg

SEQ ID NO: 121 - DNA, 3391 bp, Glycine max
atgtttggtctttattctaagctttggttatatacttttctataatactattagttgaatggtataatcttcacagacccagcacagtttgggtgttggaaatgggaaacttagctgcagagtctctctgtgctttattgttgctttatttctatggcacacttttagttagtgctaaatacataaagtataatactggggctggtgttgtgccaggaaaattgaatgttcacttggttccacactcccatgacgatgttggttggctgaaaaccgttgatcagtactatgttgggtcaaacaatagtattcagggggcatgtgttgagaatgtgctggactcggtggttgtgtctcttcagaaagacccaaatagaaagtttgtgtttgtcgaaatggcatttttccatcgatggtgggtagaacaaagtccagaaacacaagaacaagtgaaaaagcttgtggatgaggggcagctagaattcataaatggtggatggtgcatgcacgatgaagctgcgacacactacattgacatgattgatcaaaccactttgggccatcgtttcatcaaggatcggtttaacaagactcctactgttggatggcagattgatccatttggacactctgctgtgcaggcttacctgctaggagctgagcttggttttgattctatacatttcgcaagaattgattaccaagacagagctaagcgcaaagctgataagtctcttgaagttgtttggcgtggctccaaaacatttggttcttcatctcagatttttgccaatactttccccgttcattatagtgctccaaatggcttcaactttgaagtcaataatcctgatgttgatgttgttcccgtgcaggatgatcctcttattttcgattacaacgtggaacagcgtgtccaagactttattgatgctgctactacccaagcaaatgtgacgaggacaaatcatataatgtggacaatgggtgatgatttccagtaccaatatgcagagtcttggttcaagcaaatggataaattaattcactatgttaataaggatggtagagtaaatgctttgtattccactccatctatttacaccaatgccaagaatgctgctaatcaaacttggccactgaaaacagatgattacttcccgtatgccgatagtcgaaatgcttattggacgggctatttcaccagtcgcccggccttaaagcgatacgttaggatgctaagtggatactatttgacagcacgtcaacttgaattcttggttggaaagaaatcaactaaatacaatacttatgaccttggagatgctctaggaattgcacaacatcatgatgctgtcagtggaactgcaaagcagcatacaaccaatgactatgccaaacgattggctattggagcctctgaggctgaagcggttgttagttcttctttggcttgtcttactagaaaacaatcaggtgataagtgttcagcacctgcatcggcatttgcccagtgtcaattgttaaatattagttactgccctccagcagaagacaacattccagaggctaagagtttggtagtagtggtgtataacccacttgggtggaatcgtactgatattgtcaaaataccagttaatgatgctaatcttgttgtcaaagattcatcgggcaataaccttgaagtacaatatgtggatgtggatgatgttacgacaaatttaagaaaattctatgtgaaggcatacttgggggtttctccaaaacaagccccaaagtactggcttttgtttcaggtgtccgtacctccacttggatggagtacttacttcatttctaaagcaactagaaaagggaccaggagaaaagatctatctcaccccaacagtcagaaaggtgacactataaatgtaggatcgggaaatttaaagatgtccttttcctcaacctctggacaactcaaaaggatgtatgattccaaaactggagttgatatacctattcagcaaagctacctttggtatggatctagtgagggcgatagtgatcctcaggcttctggtgcatatatattccggcctaatggatcgcctccaaatatcgtttcaagatcagtgcctaccaaggtaattcgtggaccactagtagatgaagttcatcagaaatttagctcctggatttaccaggttactaggctttacaaagacaaagaccatgcagaaatcgaattcactattggtccaattcctactgatgatggagttggaaaagaggtgatcacacgaatgacagcaaatatggccacaaacaaggagttttatacggattccaatggaagagattttctaaaacgagttcgagatcatagggaagattggcctctgcaagtaactcaaccagtagcaggaaactattatccaattaatcttggaatttatactaaggataagaaatctgagttctcagtcttagttgatcgtgccactggtggagccagcatcaaagatggtgaggtggaattgatgcttcataggcgtattctccatgatgatagtcgaggagttggggaaccacttgatgaacaagtttgcgtgaacaacaataatacatgtgaaggactaacagtcagaggaaattattatatcagcatccacaagcttggagctggttcacgctggcgtcgtacaactggtcaggaaatttattctccattcttagtggctttcacacatgagaactcggaaaactggaagtcctctcatttgacaaaaggaactatcatggatccaaattacagcttgcctcccaatattgctctgataactcttgaggagttggatggtggaattgtgcttctccgtttggcacatctatacgagccaagtgaagatgctgagtattcaactcttaccaaagttgaactaaagaagttgtttgccatgaaaacgataaaggagttgaaggaggtaagtttgtcatctaaccaagagaagtcagaaatgaagaggatgacatggaaggttgaaggggacaaaggacaagaacctctggcaattaggggtggccctgtcagctatcacaatttggttgttgagcttggccccatggaaatacgaactttccttttgaaattttaaaatgggtcaaatcatcattgatgattttatttgaaggaaaaataaacatgtttgatcacatgatttttacccttgtaaaaaatggtagagggagaccaagaatgattttgggggaaaacattaaaagaaatgagtaaagatcctctccaatgacgggaaataatatttttgagaatttggttcttaaccaaatctaactcagataataatgtaaccatcccgtctaatgaaataagattattgttgttgtc

SEQ ID NO: 122 - DNA, 1915 bp, Glycine max
tccacacttcgtctcctatataaacatgtttggaattcaggaaattggactcaaaatgaaatcacgttgagtagccttttactcctagagaaattttgtagctatagagaggaagccaaagagaccttgattatctttattataataataatggaccaggcgaccacgttcaacaaatatgcctttgcttgtgctgcagttgcttcaatggtatccatcatatctggctatgacacgggtgttatgagtggagcaatgatattcatcaaggatgacattggaatcagtgacacccaacaagaggttctagcaggaatcttgaacctatgtgcattgggggggtccttagctgcgggaagaacctccgattatattggtcgtcgctacacaatcttgttggcctcactcctcttcatggtgggtgcaattctcatggggtatggtccaaactatgcaattctaatgcttggaagatgcattggtggtgttggtgtaggctttgctctcatgatagcaccagtttactcagcagagatttcttctgcatcatcaaggggttttctaacctcgttacccgagctttgcatcggcattgggatcttacttgggtacatatcaaactactttttggggaaattgactttgaggctgggatggagattaatgcttggggtagcagcttttccctcgctggctttggccttggggattctggggatgccagagtccccaaggtggttggcaatgcaaggtcgcctaggggatgcaaagaaagtgttattgcgagtttccaacacggaacacgaggccaagcttcggttcagagaaataaaagttgcaatgaggattaatgattgtgatggtgatgacaacaatgtgaaaccttcttacaagtcacaaggggaaggggtgtggaaagaattgttggtgaggcccacaccggaagtgcgttggatgctaattgcggcagtggggattcacttctttgagcatgcaactggcattgaggctgtgatgttgtatagtcccagaatcttcaagaaagctggtgtcacaagcaaggacaagcttcttcttgcaacggttggtattggcctcacaaagatcattttcttggtcatggctttgtttttgcttgacaaagttggtagaaggcgtcttttacaaatcagcactgggggaatggtttgtgggctcacacttttggggtttagtttgacaatggtggatcgttctagtgaaaagctcttgtgggctttgagccttagtattgtggccatttatgcttatgttgctttctttaatgttgggcttgggcctgttacttgggtttatgcgtcggagatttttcctttgaagttgagggcgcaaggggctagtataggagttgcggtgaatagaaccatgaatgctgtggtttccatgagttttatttcggtctacaaagcgatcactataggtgggagctttttcatgtttgctgggatatctatagtggcttgggtgttcttctactttttccttcctgaaaccaaaggtgtgcccttggaagagatggagatggttttcagcaaaaaatacagtgggaaaaatgtagcgatagaaactggtccatgattgagaaagtgtagtgtgttatatagtgagaaagagcacttcagagaataggtgtgattatgtagcattgtgggctacatgttttaaaattcaacacgctagactttatatattgttcaaccaagatccatgagcgtcacatcattttcttcgcatggttaagtaaaaaattaacaacatgaatgtacataaaaaacatgaaagtccatgtgtacaatgcttcctagagtagacagcttagttagcccttggaagtccattgtttaaaaattggttattgtacttaatggttgtgtca

SEQ ID NO: 123 - DNA, 789 bp, Glycine max
atgatcgagtttccatgcaaaacatacactcagaaccttcgttcagtttctcgctgtggcattaaaaccaaggaaaaacgttacctcggaatcatgtcgtgtgtggcagcacgtactgggcgacaacgacagcgttatgaagacaacatgcgactcgtttctggatgcattccctatagatggaaaaagggaaaagcagatcaaatgggagatacagaggagataatagaagtacttatgatttcttcaccaaaacgtgatgaccttttgtttccaaagggtggatgggaggatgatgagactgtcacagaagctgcttgccgtgaagctctagaggaagctggagtcaaagggattataagggaaattcccttgggaagatgggagttcagaagcaaaagcagtaatgattcatgtagccaggaaggatggtgtagagggtacatgtttgccttggaggtgactgaagaacttgagacttggccagagcagaaagaccataatcgccaatgggtaaacataaaagaggcattcagactaagccgatatgactggatgtgcaaggcattggaggtgtttttaagagttatggcagaggacagaacactaaagaatgaggaaaataatgttgagtctgcttcaatttcagtgccagatgggtcagaaaatcaaaatatgtcatccaaatactataaaagaacctctactacaaaacaccatggtatgccatcaagaaccaatatcctggcccatgcttcccaggagatagctatgtattttggttattga

SEQ ID NO: 124 - DNA, 359 bp, Glycine max
atagtaatatggaggaggaggtgatgtattcggtggtggtggggattgatagtaatatggaggaggaggtgagtgttttggtgatggtggagactggtagtagtatggaggaggtggtgagtgctttggtggtggtggagatgagtagatgtagttgtctgctaatgtttgagatggcaaggtgtagtgagattatggttaatgcaatagtgagagtaagagaggccattggagaccccatcttgggttttggtactgccattaggagagtgcttccctgggaccatggctgccataatgaacttcatatctcttacttttcactttccattaacagatcgtggaggctaaaagcctaa

SEQ ID NO: 125 - DNA, 2873 bp, Glycine max
aaaaaccaatattttacttcctagagttgtttccaggagaattagtagttacgtgtccctttaagcgaaaaaaaaccacatctgttttgacccaattgatgttcatgtcggctgtgtccttttccttcatggaataacaaaaattgggttgcaacctattcatgaatttattaccccaatttgctttcttgcaaaaggaagtgaccctgattggttttgttgcatgcaatggagattttggattatgggcaccccacataatccaaaaaggtcttacttttctattcagagaagggagtgcttgagttccagtgtatcagcttgatcttgtagagtaattattgcacaatggaatccaaacaagaagcaccaagtgttattttaaacttgatgggtcttgatcaagtgcctacccaacatcccattagagataagcagaaagtgctctctgagaattacctgcagaaagttgcctctattggtgtcagaaagaagcgttcatctcatcagcatcattcctctggaatgaatactagtgaaaaggaagaatttgaggatgttttaaaagtggtcaaagcactaaggcgaggtaagcaccataacccatcaaagggaaatggtaaagagaatcctatttcttgcaaaaattctaatttggatgatgggctgctccaagagatattttatcctaaaagcatgagactgtatcctgaaatgagggagagaaagaaaatatcctatcacatgaattctggtaagcagagttcaaggcctttcagtaaaatttcagaggagatttcaatgcaatcgggaaatgttgcaaacggagttttaaatactgcttcaagttcttttctcagagggaatgaagcatttgccagtgatatgctaaagctgaagcctgcttcaaatatttcagttaatgagatccaattcaatttccctttcctctgttctgattccaggaccaaaactttggcacagggggatgtggctgaaaaattgcgagaacttggacggtgtggtcaagtctgtatacataaccagttgcctatgatttctgaacatggaaatggaacaagagatttgactcatcaaagtggttattatagcaatgacaaaattagaaagaacattagatgtaaggctggtgttaattacagctttgctagaagagtgtcaatacctctttgtgcagcttcagttattgctgataacggtagaactatgaatcaggatatcttgtttcagagatattggggtttgagaaagaatgcatctgcaaattggttatcatggaagtcgaagaatgaaaatgttaaccagaaagaatgtatggaagatgtgaacctcagtcctggccatgagaaactcccttccctttcctcttatttccatagtaatcacactgaagagaatggtataaatcatatgtcagagaagagagtttatgggaaggatttgtctgataaggtaactatgcctcctcaattgtcaagttctagtccttctcccgaattgatagacagtcagatcttgcaagagaggcgcttaatgaatgatgaagtgaagaacaaaacatatgaagacagtagtatgcctatgcaaaatgttgtgtctcctgattcatcagttgatttcttggtatctgatgcaacaactgaggttgttggcagatcacattataacccaaccaatcatcaatataaatcaacagtcttcttgtcacaagaaattgattctctgagttatacttcaaagaaacaggatacatcagattttcaagaagattctgtactttcactttgctctgaggctgaccccgattccatcagtagctttgaggaggcatatgaacctagtccaatttcagttttggaacccttatttggagaggacagtcgattcagctctaaatgtggcgatcatgtatatgattcctctgaagtggatgatgaagaatatgatttgaatgtttcaagtgatgaagattgtgagaatgaatatgtagatgaccctgaagaaaagaaagatatagcaggattatttagagctgaagaaagtagggatttctcatatgttgttgaggtcttaaccgaggcaggtatatgtaataggagcttgttcacagacttttctacatggcactctgcagaatgtcctattagcccttctgtcttcgaaatcctggaaaagaaatttggcgagcagcaactttggaagaaatctgaaaggaaacttctctttgatcgcattaacttagggctgctggagattctgcagccatatttgtacatcccaatgtgggaaaagcccatgtcaagaaggttgaatgccgaaccaagccagaacatgattgaggaggagatgtgggggttgcttgttgcacaggaaaagaaagctagtaaagggttagcagacagtatcctcgaaggggagattaggtggatagaactagttgaagatgttgaagatattgttagagagatagtaaatttgttaatagaggagcttgcaaacgagatagttagcttggagaaattttgaaagattatagttttgtgtgcggctatagcattttttatatgttacaagcaattggtgtacagcttgattgagtcgattttgggaggttggttttgagtcaatgttgagagtttgaattaggacataggtattttcaagagtttgaaatagcatataggtataggttcactattctttcatgtgggacaacattgtatttcattttatccaaaaaagaagaatatgcttgttgatttgttgtattcgctatgatgatcttatgcatctcattgcattgaagcaaacatcaattgtattttagaatgcaagtgtcttgttttttgtta

SEQ ID NO: 126 - DNA, 729 bp, Glycine max
atggacactagtgtctctccctctctcctactttctctcctcttctttgcaagagtcttagggcttgcagtggcagtgcttgtcctcatatgggcccttgccttcaaatccagcttcctcactacctcactctcccaacaagacctcatctatgcagttcttcatcctctgctcatggtcattggctttatcctcttaagtggagaagctattttggtgcatagatggttacctggatcaagggggttaaagaaattggtgcatttgtggcttcaaggggtggctttagcttctgggatctttgggatttggacaaaattccagggcaaagatgggattgtggcaaatttctatagcctacattcatggatgggtttggcttgtgtatccctctttggagcccagtggttgattggcttcttgaacttttggcaccgaggagaggtgcgaagtgtgaggataaggatcttaccatggcatgtattccttggcctgtacacttatgcattggcaatagcaacagctgaaactggattattagagaaattaacattcttacaaactaaaagaaatgtacctaagcacagcaccgagtccatggtggtcaatagtttagggttgggtcttgccctcgttggtggctttgttattttggctgctgtttcacccaaatatcaaacccatcaaagcaaactttggtactcagaaacaaagtgtttatcatcttaa

SEQ ID NO: 127 - DNA, 1087 bp, Glycine max
ggtcttagtctcaagagactaactcagtcactcactcaacaaactagtgaattgttatggacactagtgtctctccctctctcctactttctctcctcttctttgcaagagtcttagggcttgcagtggcagtgcttgtcctcatatgggcccttgccttcaaatccagcttcctcactacctcactctcccaacaagacctcatctatgcagttcttcatcctctgctcatggtcattggctttatcctcttaagtggagaagctattttggtgcatagatggttacctggatcaagggggttaaagaaattggtgcatttgtggcttcaaggggtggctttagcttctgggatctttgggatttggacaaaattccagggcaaagatgggattgtggcaaatttctatagcctacattcatggatgggtttggcttgtgtatccctctttggagcccagtggttgattggcttcttgaacttttggcaccgaggagaggtgcgaagtgtgaggataaggatcttaccatggcatgtattccttggcctgtacacttatgcattggcaatagcaacagctgaaactggattattagagaaattaacattcttacaaactaaaagaaatgtacctaagcacagcaccgagtccatggtggtcaatagtttagggttgggtcttgccctcgttggtggctttgttattttggctgctgtttcacccaaatatcaaacccatcaaagcaaactttggtactcagaaacaaagtgtttatcatcttaataaaatgcactagcctggttgatgctttagtgataaataataacatagttatcaaactcttgagttaattcattaacttttactagtttatgagtttacttaccttctttaagttgactcttaagtaaattttctttttagtagattttgggtagactttataaactctaagtaaacttgatagactctcgagtttatcatcgagtcagtaagttaaaaaaattagatcaaaatgtaagtcattttgggttattttatgtctatttagtattcaacataacttcatttagtgtgttattctc

SEQ ID NO: 128 - DNA, 2033 bp, Glycine max
aaagttgcatatttttggtgtgaaattaaattttgatatgaggggaagaggtgaaaatttaatgctacaatataccctattgaatttggggtattggagggtagggtcagggtttcgtttcactgttgctaatgcattaattgcagaaggagaaggtggagggtgtaatgtgtgaagagggattaagagagagagagtcacagttgaccattatgaacgctataattacaactcatccattatctatctcttgatccctgcagaatattgtgtaatcagactagtcactaatctctttggttgacaataattgtcataataccagtgattgttgcatagaaaatttgcccatgtatttatacctcagcacaccatgaaattagaaggtaataaagtggctttttggcattcaaatattggtcttgagcctgaatctcaagcgtttgtgttcattgacgatgatcaagtttccgatggatacaaattacaaaaccagaaagtgaaggaatacgaaaatggagttcatgcagttttagagaacaatgaagaaggtttagattcatcacaatatcacatggagtcagctgattgtatgaaaaatgaatatgaagcaaagaaactcaccttggaatcctgaggatggttacatggacaaaactgttacacaatgtgaaccacatctggaagtgtgttacaaagagagtaattatcatgttgtcaaggatatctgcattgatgaaggggtccttaaaaaggataaggtcatgtttttgaatcccgacgatgaaaaggctcacaatttcttcccttctgatagttacgaaaataaagaaaagcagaaagacaacaccagtatcggtgtactaagcctaataccaacaggggaaaaggctcacaatttcttcccttctgagagttacgaaaacaaagaaaagcagaaagacaacaccagtatcaatgtactaagcctaacaccaacaaaggagtctgacaaggatcctgctaatcatgatcagcccaaggatttgatgcacaaagatgaggatgcaactgaaaaagtttccagtaatgtcaacaaagagacgcctttacccgaagacaaggttttgttgcaagatttactcgctcaggattctgtatcttctgatgacaagggtgaacagatctccaatgagcctgaattgcactcccaaccggaagagtccaaaaatacagttgaggaagcaatattggaaactccttctttggcattggaagatgatgaatcaaataatgataacgtgctttcagagaaaggaagcttcactcatcaattggatccttcagttccttcggattgtggtaaagaggattgccaccaagctggtgtttgtaaatgtgatgaaattcaacaaacaatgaagccggtagaagggaagtctgatgatcaggctgtaactggcactgttcgtcacagcctaggcgaggcaagtttctctgccattggccctatgtcaggtcgaataagctactcagggccggtgccttattctggcagcatctctcttcgatcagacagcagcactaccagcacgcgatcctttgcattccccataattcaatctgaatggaatagcagcccggtcaggatggcaaaagccgacaggagtcactaccggaagcaacggtggtggaaggatagctttctttgctgtaaattctgagagattagtttcctttttaataggttaaagatttcatatatatcatttaaattctaccttgagtatcatgcttcttatacatcatctccctagctgttgagtagtgtgcagtaggtttagaatggccagtcaatgctcctaaatgtttgcaggcaaaggtagtcgttttagcatagcttgcatctgcttctctcccttttctctcattgcctatacatggtttcattgatttttttattttatttcaattacaaacaatttagtagtacatattaaattttatgtataactgcaagcttttaaattagaaggtagttagttgaatctttg

SEQ ID NO: 129 - DNA, 1325 bp, Glycine max
tctacttcatgcaaattatatatactcttgattcccacccatctctcccacccttcattttttttttcaaacaaagttaattaaagaagtaacaatggatccttcctttccttcaaaatcctttctgcatgttgttcttatcttttgctttcttggtgccaccagattgtatgcgaatgacccttatctaacactggattactatgcatcaacttgccccgctgtgtttgacattgttaggaaggaaatggaatgtgcagtgctttctgatccccgcaatgcagccatgataattcggctacacttccatgattgctttgttcagggatgcgacggatcaattttgcttgatgatacaatcacacttaaaggtgagaaaaacgcagctaccaacatccactctttaaaaggcttgggaattgttgataaaatcaagaacatagttgaatcagagtgccctggaattgtttcttgcgctgatattctcactattgcagccagagatgctgtgattctggtgggtggaccttactgggatgttcctgtgggaaggaaggattctgtcactgcaaattttgatcttgccaacaccaatcttcccactcctgatgagagccttctctctatcattgccaagtttctttaccaaggactatctgtcacagatatggtagcccttgtaggagcccacaccattggcatggcacagtgtaagaatttccgttcaagaatttatggagacttggaatcaacctcagtgaaaaatccaatctccgagagtcacctaagcaacttgagatctgtttgtccacctattgggggaggagacaataacataacagcaatggactacatgacaccaaatctctttgacaattctttctaccaattactactaaatggggagggacttctcaactcagaccaagaaatatactcaagtgtgtttggaattgaaactagagagattgtgaagaactatgcagcagatcctctggctttcttccaacaattctcagagtcaatggtgaaaatgggaaacatcacaaactcagaaagcttcttcactggggaagttaggaagaactgcagatttgtgaacacataataatagacttcattttttgtgttttttgtacgttttgtccgtttccatacacaaagaaccatcaaattcatgctatagcaagttgatgtgttaaatctaagctagcaattttattatataatgaacattaagtgagaagttgatgatatcattcttttcttcatataaaaggtgagtgttgagtttgataatgaaagttgtaagagccaactcctga

SEQ ID NO: 130 - DNA, 481 bp, Glycine max
actatgtccccgacctatgaagacagggatggcgactggatgcttgtcggtgatgtgccatgggagatgtttgttgaatcatgcaagcgtttacgtatcatgaaaggaaaggaagctattggactggcaccaagagccgtggagaaatgcaagaacaggagctagactagtagttaccagtccaaaatctgctccatcatcattagcggtgcctagttgacttagtaactgaagcaaggttaagctgcagcagacacagagggagagagcagggtgttaaaaaatatagttaagtaaatctgtgtatcattatggtttgttatataatatatatttcaaacaaagttgtgagatgtcgtaagtataaattatgaacacaaacgataatgactctaaattatgttgcaagactttcttatttctttacttgtgtgcttgcataataataagtttattaatttgcttgtctgttgtagtagat

SEQ ID NO: 131 - DNA, 4365 bp, Glycine max
gggagcgcagaaatcagaaaaacaaatcgcttccgcttttctctttctctcttctatggctcccctcttcgtcttccctcgcacactggaagacctggaacacgaaggacgcgaagacgacgacaggctctacgtccagaaccctgtcaacatcgcttcccttgtctcctctcaactcgaagagttcgtcaaaggtgtgtcgtttgatctttcggacaaggaaatcctgtgcgttgaggagcaggatgtgttcgaccgcgtgtactccttggttcgcggcttcgcccttctctccccctcctccaaattaaacctcctcgaaactcttcgttccaacctcgccgtccttctccccaacttcgattccctctccagggcctcccatgaccaccacgttcccctcgcctctcaccgcaatgctttcaaaatatacaccttcttcctcctcaacatttttcttctcagcaacaacaacaacgcctccaaggtggtggccccaagtgctaggaagaaacccgctgtcaattcatggaattgggaggcacagagagctcggatcctcaatctcattgccaattctttggagataaaccttgaactgctttttggctcgccggacctggacgaaaactatttgtctttcattacaaaaaatgcattctttatgtttgaggatgcaactctcttaaaagattctgatttgaaagatgccctgtgccgtataattggagcctgctctaccaagtaccattacaccgcacagtcgtgtgcatccatcatgcacctgattcacaagtatgattttgtggtcacgcacatggcggatgcagttgctggtgctgagaagaagtatgcagatggaagccttgccatgtcacttgttagggagattggaaggactaatcccaaagattacgtgaaagacactgttggggctgaaaatgtgggtcgtttcctggttgagcttgctgaccgcataccaaaactgatttcgactaacattggcattcttgtccctcactttggtggagagtcctataagattcgaaatgcacttgttgcggtgctggggaagttaatagccaaggcatttaaagatgttgatggtggtgaagtgacttccaagtccattcgtttgcgtaccaagcaagctatgttggaaatcttgcttgagcgttgtagagatgtttctgcctacaccagaagtcgagttcttcaggtgtgggcagagttatgtgaggagcactctatttcaattggcctgtggaatgaggttgcagaagttgctgctggaaggttggaggacaagagtgcaattgtcagaaaatctgctttgaatctgttgatcatgatgctgcagcacaacccttttggtccacagcttcgaattgcttcattcgaagcaaccttagatcagtacaaaaagaagttgaaagagcttgagccttcagaaggagcagaaccctcctctgatactgatatttacaatggggatggagaagtggatgatttaaattgtgaaaatgttgtgaaggggcagcaactagacagtttaactgatagttgcctgtcccaatcagaagaagcgatccctctgcagaacagtagtgtgccagatgttgggaacttggaacagactagggcattggttgcatctcttgaggctggattgcggttctctaaatgcattggagccacaatgccaacacttgtccaattgatggcttcatcttctgctactgatgtagagaacacaattctcttattgatgagatgcaaacagtttcagattgatgactctgaggaatgtcttcgaaagatgttaccattggtattttctcaggataaatccatctatgaagcagtggagagcgctttccatacaatatatatcaggaaaagtccaattgaaactgccaataatcttttgagtcttgccactgattccaatataggagatctagcagctcttgagtttatagttggtgccctggtctctaagggtgaaatatcttccagcacgatatcagcattatgggatttcttttgctttaatgttggtggaaccactgcagagcaaagccgtggtgctttatcagtcctttgcatggttgcaaagacgtcctctggtgtgcttggctcacattttcaggacatcattgatattgggtttggtcgttggtccaaagttgatcctttgcttgctaggacagcttgtcttgctatccagagactgtccgaagatgacaagaaaaaactgctggctagtagtagtgctcgaatatttggttttctagaaagtttaatcactggtttttggcttcccgcaaatatttggtttgctgctgctgacaaagccatagctgcaatctatgccattcaccctaccccagaaaccatagcagctgatatgataaagaaatctctcagttctgtctgtaatgatggcggtgttaatgtgcagagtgacattgacacaagtagtggcagtatgcctctcacagttcaagtagcaaagcttagcagatgtttatttataataagtcatgttgccatgaatcaactggtatatattgaatcctgtgcccgtaaaattcagaagcagaaacttacaaaagagaaaaaggacaatgagaatcagaacctagacagcaatggcaccgtatcaactggtacacagaaggataatgatataaatgcagagttaggatttgctgcctctgaggatgcagcgcttgatgctttgtttgaaaaggcagaaaaagaaatagtatctggtggttcaaatgaaaagaatttgattggtatctgtgcaacctttttgtcaaagctttgtaaaaatttaggactaatgcagaagtatccagaattacaggcatctgcaatgcttgctctgtgtcgattgatgattatcgatgcagatttttgtgatgcaaatctccaactccttttcacggttgtggaaggtgcacattctgaaattgttcgttctaattgcacaattgcattgggagatttagcagtacggtttcccaacctcttagaaccatggacagaaaacatgtatgcgcgcctaaaagatccctgtgcatctgttaggaagaatgctgtgttggtgctttcacatctcatactaaatgacatgatgaaggtaaaaggatacattaatgaaatggctgtaagattagaagacgaagatgagagaatttcaaatctagctaagctattttttcttgaactttccaagaaaggaaacaatccaatatataacttacttccggatattctaagcaaattatcccagcaaaatctgagcaaagattctttctgcaacatcatgcaatttttaattgcttccatcaagaaggatagacaaatggaagctctcgtggaaaagctatgtcatcggtttagtggtgttacagatgttagacaatgggaatatatatcttattgtctctctcagttatcgtttactgaaaaagggatgaaaaaactaatagagttatttaagtcctatgaacatgtcttgtcagaggattctgttatggaccatttcaggaacatactgaacaagggaaagaagtttgcaaaacttgaacttaaagcttgcattgaagagtttgaggataagctgaataagtttcacacagataaaaaggaacaggaagttactgctcgaaatgctcaaatccatcaacagaagattggcagcagggaaggttttaccgtgactataaattctgaagatcacttgtcatctaattcttcttcagaaggtgaaataattgatgcttacactgaagaggcaactatgcctttaaatgagagatcagaatctaaacttgtgtcagaatcacattctggtgcttcaagtgagttgacagagtcggatcaaggggatattgaaacccgggatattgaaatccaatcaccccaggttaagacaaaaggagttcaacggtccagaactaataaaagcaatgttaaaggtggaaccaaaagaactattcgatcaaagaggtagatactgaggcgccttttgatgagaagatatactttttcagtttgatgtgggatgtggttatatagcaaatggaatctggaagatctactgaacagatgcaaatatatgactgcatattcaagtttggatacataatgcttaacagattctagtagaggcaactacggttgcaatgctttaatatttaaattggcataaattatgtatactgttttacaatatcaatttaaagtgtgtatcacagataattctaggatttgattcctaaaatatatctcatttgaggaaaatatgatttgtaaaattgcagggccaacttatcccaagtagtaatttaa

SEQ ID NO: 132 - DNA, 2347 bp, Glycine max
ttttgtgctccgcagctgccaggaacgtccgcatgaaacggccaaaactcgagtaacataacatccagcgacacgaaatttccatcgctaaaaattgaacacatgatataccgtagtaccatacgcactcttctgctgcactataattcccgtgttgcgtcgtgtctatcttcattttcatattcttcttctgcaaccacacaagaacaatgggaatagagattctggagcctaacacgtgcattaggggttgctgcaccagcccctctattccccttcatctccctccctcttcttatacccttctctctcctattgcccgagggtctgagagtgttgtttatgaagggactttggatggcacgagggttgctgtgaagaaacccatcttgtcaacttcagaagacattaataagtttcataaagaattgcaattcaagttagatcatccaggaatagcaacaccgattgcggcccatgcaaaaccgcccaattacatgtttttcttcaagttatttgaatctccaaatctagcacaaaagttacatgtggaagagtggatcccaactctgaacgatgcacttatgatagcaatgcagttagcaaaggctttgcaatatctgcataacctcgggattgtgcatagagatgtgaaaccggcaaatattcttcttgacaaaaacctttgtccacacctcacagattttggtttggcagaatacaagaatgatcttaagagagtttctactgagaattggaagtcttctggaaagcctactggtggtttccacaaaaagaatatggttggaacactcatttacatggcacctgaaatattaagaaaagagttacatacagaaaagtcagatgtatacagttttgggatatcaatcaatgaactcctaactggtgttgtgccatacactgatcttcgtacagaagcgcaggctcacacagtgcttgagatgaactatactgagcagcaattaacagcagctgtcgtttctgatggattacggcctgtccttgctgccgaggacttgggtataccgtcaagattattatcaatgattaaaaaatgctgggatgcagatcctaataacagacctgcttttgatgacattgttgaggaacttgatttagttatggagcatggtaagttaaagaaggcagaagatattcatatcagaccttataacttgcatgttgttcaacctgcgggcaagactgatcactttaaggcttatcaagagagttttagctggttcactcgtggcgaacttttggccaggagtgcctctagtgcaaatgattctggtttgataactaggtgcgagtcttctgacaagccttcagcataccacccaacaatgtcttggggatcttatgctacctgtgggagaagggagactatggaggatacacatttcattcttccccatatttgtgatgaaaaggatgcctatgcttttggtatctttgatggccataggggtgcagcagctgctgccttttcttctagagctgtaccagcagttttgcagacttcagatttcatgggcagtcctgctaatgcactagcggaagcattcattaagacagatgctgccttcagaaaagagcttgattcctatcgcaaatccaacagatgtatccagaaggattggcatcctgggtgtacagcaattgctattcttatagtcagaaacaagctatttgttgctaacattggtgattgcagggtaatcttatgtcgtgctggtaatccaattgctctaagtaaggatcatgttgcaagctgtcttcaagagagagagcgtgttattcggcaggggggccaagtacattggcaagttgatacttggagggttggtcttcctgcacttcaggttactcgttctattggtgatgatgatttgaagcctgctgtaactgcagaacctgagataactgagagtaccttgtgcccagaggatgaatttctggtcatggctagcgatggcctgtgggatgccataagcagtatggaggtcataaatataataaaagatactgttaaagagcctggaatgtgctccaagaggttagctactgaagcagtggaacgaggcagcaaagataatatcacagttatcgttgttttcttacgtcctgtgtctacagcagagagaatttattagcataccttcttgcatgctctttgagacttgccacaaatagcacatacttatattcctttattggataataaaagataaattatgtttttagtctctaaacttttcgttatttatggttttgtttcttaaattcttcaatgatcaatcaacgtcttcaaactttttcc

SEQ ID NO: 133 - DNA, 2341 bp, Glycine max
tttcctttctttccatcgtaagtgtccactgtgcatcccctgttaggatgtgaacaagaaagaagaaaacaaaggaaacattttccactacaaattcaacaaaaggaaagctgatacgctatttcatcttcttcttcttcctcaattcatcatctgaaagtcaaactgtggcataattcaactttttcctctcaccctaggttcctcttcaacctctccacactttttcagagacaaattccccttattttctcccataagaattaatcaaccccactttcacttaccccacgatccggctatctcaaatcaaccctctctcacagactaacaaacaaacaaaacaccgtttcattatgtacaacccgccaacaccatgtatttaaccattctccttaaccattcttgacaaaaacaacaactctcctttttttttttctccttctcctcttcttcactctcaaataccagatcctcccatttcaattatttccccccttcaaaattccaataccataatcccccatctctctccaaatcctacaattttcaaaatattcttattctctttctctattcccatcacaattcacacccaatccacactctcccctcacactcccctcactctcctcccccaaccaccaattttttccatcaaagttccaatcttttcccctccccatcaccaaaaatcttgttccactccttctcccccatctgattacatttcattattctgattcttcctctcttcacatcacactctccctccctacccacccacccaccaattttttctttcaaagttccaatctttgttaccccatcaccaaaaatcataaaaaaaaaaaaatcttgttttcaccctctctcccatctgggtgcatttcattatccacctctttatccctttctctctctggcttcatattctggggatccgtgagagagggaaatgtgggatgttttcgtggctggcaaggatagtgtcggcgtgcttgagaccggtgcggcgatatgcacgcatgagcaagggcgacaatctcgatgacgtgtccaccgtcggcgacgcgctcgtctgggggaaggacctcgagcagcattcgtgcggtgattctcctacgcggtcgttcaggccaacgaggtcatcgaggatcacagccaggtcgagaccggctccgacgccgtcttcgtcggcgtctacgacggacacggaggcgccgaagcctcgcgcttcatcaacgatcacctcttccttaatctcatgagagttatggaataaagccattgatagcagcaatgggttcctgttgtctggttggtgttatttggaaagggacgctatacattgcgaatcttggagactctcgcgctgtaattggttctgtaggtagatctaacaagatcattgctgagcagttgaccaaagagcacaacgctagcaaagaggaggttagacgagaactcaagtctttgcatccagaagattcacaaattgtagttatgaagcaaggaacctggcgcattaaaggcattatccaggtatccagatctataggagatgcatatttgaaacggccagagttctcatttgatccgtcattccctcgtttccacctgcctgaacctatccgccggcctgtgctaactgcagaaccatctatatgttcaagagttttaagacctaatgataagttcattatctttgcatctgatggactttgggaacacttgacaaaccaggaagctgttgagattgttcataccaatccacgaaccgggattgcaagaagacttcttagggcggctttaaatgaggcagctaggaaaagggaaatgagatataaagaccttcagaagattggaaaggggattaggcgtttcttccatgatgatatcacagtggttgttgtctacattgaccacgacttgcgctgcaagaatgttacagttcctgagttgtccatcaaagggtttattgacacagttggaccttccaattttagaaatttgcggggattggaatgatcacaagagggggttcatttctagaactgtagccaacaaacttgactggctctgcttcattgtccaaaaggaagctaaaagaaattcaatacttcattagacatttttgcagcatctaattgttctttatcttgaatatttgttctcacttttcaaggtttttccttgcttaacttttaagttttaaactataccttgtctattggaaacatgtttgctggtgataaattagtggagccatatttttctcttcattgttggtggtacactttgcagtgtgattgttacatgccgttataactagtttgta

SEQ ID NO: 134 - DNA, 7162 bp, Glycine max
aaaaatagcgcaaacaaaacgctgcgttttagccaagtcaggtgtgaagaaagaagctacgctgtccatctcgcctcgcgtgcgtgtgcgtgcgtgcgtggcttcttgtaatttcttctctcgtcttctcctcccttctttcttcttcttcttcctccttccttccttccttcctctctctgcgttaggtttttccatagttacacacatcacacctttttttttttcttcttctcattctcattctcattcttcttctccaccgacactctcttcttctcggcccctattcgtctcatccgctgcgaactccaacgatttcctcaacttctcgctcgataaggtatgttcgccgcgtgagtttctggctaccgcgatggcgtccaaaggtcccaggtcgaggattgatcacgagagcagagccaaacgccagaaggctcttgaagctccaagggagcctcggcgacccaaaactcattgggaccatgtcttagaagagatggtctggttatcaaaggattttgagtcagagaggaaatggaaattagctcaggcaaaaaaagtagctttaagagccagcaaaggcatgttagatcaggctacaagaggtgaaaagaagatgaaggaagaggagcagcggttaagaaaggttgcacttaatatttctaaggatgttaagaaattctggacaaaaatagaaaaactggttctttacaaacatcaaatggaactcgatgagaagaagaaaaaggcacttgacaaacagcttgagtttctattagggcaaaccgagaggtactcaacaatgttggctgaaaatcttgtagatccttataaatcagcagagaataattctgcagagcaccacatgagtattcaatgcaaagatgtacatgatgttattaatgaacctaaggaagctgatgttgagtatcaatcagatgcagctgacaatgatgaagaatatgatgtacaatatgatgatgaatcggaggatgatgagcgaacaattgagcaagatgaggctcttataactaaagaagaaaggcaagaggaattggccgctttgcgtgatgaaatggatcttccaattgaggagttacttaaacgttatgctggggataaaggagaatctgtaatgaaagaaagtagtccagagcatagtgaagatggtgggaaaatagttagagctggtgatgaaaacggagatgatcttttatctgtaagcaaaattggcacaagcaactccagcatagtctctggtcgacgttgtgatgaaagtaatggtgatgttgctacaccaacaaacaatttatctcaatgtgagaatggtcaatctgaaaatctaaaagaggttcccagtgagacagcgaatgaagatttttcatatgattttactgatgaagaggaagatggtgactttttgcttggcatagaagataaggatgatgaaacaaccttatctgaggaggaacaactggaaagagttgatgcaattgatcccaaggacgagattgcattgttacaaaaggagagtgtcatgcctgttgaggaattgcttgcaagatataaaagggacccaagtgacgatgaagatggggaatatgaatctgattatgcttctgctttatcagagaacaattcggattctccagtccatgaggatgctgggcagaaggatcctgccattcctatggatgaagatatcaagtctggtgagcacctggctgccatacagtcccaggaagaacagtgggaatcacctcatgaaaatttagaaaaaagagaaagtgaggatataattgctgatgcagcagctgctgcaagatcagcacaacccactggaaacaccttctccacaactagtgtgcgtacaaagttcccttttcttctcaagtactctcttcgtgagtatcaacatattggattggattggcttgtcacgatgtatgaaaaaagactgaatggaattttggcagatgaaatggggcttggaaaaacaattatgactatttctttgcttgcacatcttgcttgtgataaagggatttggggcccacatttaattgttgtaccaactagtgtaatgcttaactgggagactgaatttctgaaatggtgtcctgcctttaaaattttgacttattttggaagtgcaaaggagcgaaaacttaaaaggcaaggatggttaaaacctaactcctttcatgtatgcataacaacttatagattagttattcaggactccaaagttttcaagcgcaaaaagtggaaatacttgatcttagatgaagctcatctcattaaaaactggaagtcacaaaggtggcagacactcttgaatttcaattcaaaacgacggattctcttgactggtacgccactacagaatgatctcatggaactgtggtctctcatgcatttcttaatgccccatgttttccagtcgcatcaagagtttaaggattggtttagtaatcctatatcagggatggtagagggtgaagaaaaagttaataaggaggttgttgatcgccttcataatgtacttcgtccattcttacttcgtcgacttaagcgagatgtggagaagcaacttccaatgaagcatgaacatgtcatatattgtagactatcaaagaggcagcggaatctgtatgaagatttcattgctagttcagagacccaagccacacttgcaagtgccaatttttttgggatgattagtattatcatgcaacttcgtaaggtttgcaatcatcctgatctatttgagggtcgtcctattgtcagttcttttgatatgcgtggtattgatattcagttaagttcttctgtttgctccatgcttttgcctagtcccttttcaacggtggacctaagaggtttgggtcttttattcactcatcttgactatagcatggctgcttgggaaagtgatgaagtacaaactattgagacccctgtgactttaatcatggaacgtactgatatggccgaactagaagtaattaggccacataaatgtcaaaaaaagttgcaaggaacaaacatttttgaagagatccaatgggcgatctgggaagagaggctaaaacagacgaaggaacatgcagcagctattgcatggtggaactccttgagatgtaaaaaaagacccatctactcgacaactctaagggatcttgttgccttaagacatcctgtaaatgatattcatcaggtgaaagcaaaccctgtttcatacttgtactcatcaaagctagctgacattgttctctccccggttgaacgatttcagaagatgactgatgtggttgaaagcttcatgtttgcaattccagctgcacgggcaccctctcctgtatgttggtgcagtacaagtgagactagtgtgtttctgcacccatcttacaagcagaaatgctctgaagttctgttaccgctgctgtcaccaatcaggcctgcaattgtccgccggcaagtgtatttccctgacaggcgtcttatacaatttgactgtgggaaactgcaagaactagcaattttgttgaggagattaaaatcagaaggtcaccgagctttgatattcacccagatgacaaagatgcttgacatattagaggcattcattaatttgtatgggtatacatacatgcgcttagatggatcaacccaaccggaggagagacagaccttaatgcagcgctttaacaccaaccccaaatattttcttttcatcttgtcaactcgtagtgggggtgttggtatcaatttagttggagctgacacagttattttttatgatagtgactggaatcctgctatggatcaacaggcacaagatcggtgccacagaattggtcagacacgcgaagttcgtatctatagattgattagtgaaagcaccattgaggagaatattttgaaaaaagcaaatcagaagcgtgcacttgataatctagttatacaaagtgggggttataatactgagttcttcaagaagcttgatcctatggaactattttcaggtcatagaacactttcaataaaaaatatgccgaaggagaaaaaccagaacaatggggaagtttctgtaactaatgcagatgttgaggctgcattaaaatgtgtagaagatgaagcagattatatggctttgaagaaagttgaactggaagaggctgtggacaatcaggagtttacagaagaagtcattgggagatttgaagacgatgaatatgtaaatgaggatgatgagactgcagaattaggtgaatctgttttgaatttaaataaagagaatgcgttaatgttaaatggaagtgatcataaggaagatagaccgccacactctgttgctggcaaagaagatgatcctgacatgctggctgaagtcaaacagatggctgcagctgcagctgcagctggacaagctatctcagcatttgagaatgagctacgccctattgatcgatatgccattcgttttatggaactgtgggatccaattatagataaaacagccttggaatctgaagtcaggattgaggacacagaatgggagttggatcgcattgaaaagtacaaggaggagatggaagccgaaattgatgaagatgaggaacctcttgtatatgaaagctgggatgctgattatgcaactacggcatatcgacagcatgtagaggccttggctcaacatcagttaatggaggaactcgaatatgaagctagacagaaagaagccgaggaaacttgtgattctaaaaagactcaaacaccaggggattcgaagcccaaatctaaaaagaaacccaagaaggcaaagttcaaatctctaaagaaaggatctttaacctctggcttgagacctgtcaaagaagagtcacaagcagagcctatgaacatagatgatgaggatgtcactggtgtagattttctgtctccaaattcaaccaagcagaaaaaacgtaagaagtctaaattaactactgatggtgaagaagaaaagagacttaagaagtctaaaaagtccaagagggatcctcctgacatttatgcttccgatttagaatccaactcattagttgtgcaggatgaacatgcagaatcaaagacttgtgaaagtctggttgatttagaacagaaaacagcaagcaggagtaagataggaggaaaaatatccatcactcctatgcctgtaaaacgggtctggatgataaaaccggaaaaattgaaaaagggacatcattggtccaaagattgtattccaccagctgatttttggctgcctcaggaggatgcaatattatgtgctgttgttcatgaatatggtcctaactggagtttggttagtgaaacgctttatggcatgagtggtggtgggtcatacaggggaagatatcgtcatcctgtccattgctgtgagaggttcggagaactattccaaaagtatgtcttgctgtcactggacaatgcaaatcatgagaagatcaacagtccaggctctggaaaggctcttcttaaagttacagaggataacattcggatgctgttagatgttgcttctgagcaggtaaatagggagttactgctgcagaagcatttttttgcattgctttcatctgtctggaaggtggcatcacatgttgaccgcaggcgaaatccattacccacctgcaatggtctctatttcgatcagagtttctatacttccattggccagccttcacaaaattccttgaagaaatcctctaaaaggatgacatttacaaatttagcccagagcaagaagttagtagcagctgcacttgatgatatcacaactaggcaagtgaatgacaaagtcattctctctaaccaaggtgaagacatgccagtaagtgcagatcagctggatataacactggagttcacaaaagaggatagcgacgtcctatcttcatttccatctgttataaatttatcaataattgggactgaaccaacaccatctttaaataagcaaacaggagaagatgatcttaaagttggtttgttcattgctgagaatcgtttcagggaggcagcaagagtttgtgaagaagacagctctggatgggcatcatctgcattcccaaccaacgatgcaaggtctcgagctggatccaggatacaatcctccggaaagcagaagtcttccatgtccgactcttctaagccttctaggtcaaagtccaaaaaagcttcaatggatcctagtgaaatgcatcaccatcaggctgattctaaattccagtcaatgccatcactcaaagatctgagaattgatctcacttcattaactactgatgaagttggaattgatagtatgggtagcattttctcctttgacttgaatggggaaagttcattggaaatggagagtgttggaatgatcccacatgattatgttgctggtttaatctcagaccttgatgattgtacagcattccctgaatatactgacattagataaggatcaaatcaagcctgaaatgcagttttgaaatgacctttggcttacaaagtggcttactcttggcgagttagtcttgatcagttcatgaattgctgttggtttacaattggaacaatgcgttcttgaagttctctcgtaggcatgccatttttggatatacagacaaacaagtcaaaggcaagcctgctgaaggtttcgatatgaaaatatgtagagatgtagaacgctgtcaataatttaatttcatacttggaattatgtattggcttgggggttcagcatgaagtttgacagcgccattctcccatagatcggtactggttggtaagaagctttcattttctcttccctctaatggtgcacatggatttgccttggatgttttgcatgctcacgtacatatgtttttagctggggcatgcctagggtttagttctttaacttgcaacattttgttatgcaaacagaacaatttagtcttttagtggctagtacattagtcccattcatttagaacaacacttcacatgatttaacatgagttttacaccatctatatgcttggagtctaatatacatattttaaaatgatgtttccctttcttccccggttcaaggaacgatgttaagtgattctaacatcccaatgtgcaagccaag

SEQ ID NO: 135 - DNA, 762 bp, Glycine max
atgctttttctgctactggttaaagctttgttctacatgtatggatattataagataaaagaagaagaccaggctcggatagagaaattcttggaggattatgcggcaatgaaacctactagattcacttatgctgacattaagagaatcacaaatgggtttagtgaaagtttaggggaaggggcacatggaaaagtgttcaaaggaatgctctcccaacaaattcttgttgctgtgaagattctcaatgacacagttggagatgggaaggacttcataaatgaagtgggaatcataggaaaaattcatcacattaacgttgttcgcttgcttggattctgcgcagatggattccaccgagctcttgtctatgatttcttcccgaatggttctcttgaaaagttcttagcaccaccggacaacaacgatgttttcctcggttgggagaaattgcaacaaattgctcttggtgttgccacagggattgagtatctccatcttggttgtgatcacagaatacttcacttcgacatcaatcctcacaatgttttactagatgaccacttcctccccataatcacggattttggacttgccaagttgtgtcccaaaaatcaaagcacggtgtctatgaccgcagcaagaggaacgttagggtacattgcccctgaaacatcacctggttcttctagaacaaatgctcttgttccaacaagacgtcagaatttcgagttggaagttattcatgaaatagaagagtaa

SEQ ID NO: 136 - DNA, 1779 bp, Glycine max
aatgataaaaaaaaaaatgaccaaattgacaggtagaaaattatttccactccaccgaaatcctatgaataccacctgccaaatctgttgccaaaattgaacaatagcttctacctacctaaattttcccaatggcttcgagtggaaaattccttcctcaccaaacccaagtgatggcagttctgatacctttccctgcacaaggccatctcaaccagcttcttcatctctcacgcctaatcttatcacacaacataccagtccattatgttggcactgtcacacacattcgccaagtcacacttcgagaccacaactccatctccaacattcatttccatgcctttgaagttccttcctttgtttcccctcctcccaaccccaacaatgaagaaaccgatttcccagctcatctacttccttcctttgaggcctcttcgcatcttcgggagcctgtgaggaaacttcttcattccctctcttctcaagccaaaagggtcattgtcatccatgactctgtaatggcatcagtggcacaagatgccacaaacatgccaaatgttgagaattacacttttcacagcacatgtacatttggcaccgccgttttttattgggataaaatggggagacccttggttgatggcatgcttgtcccagaaattccttctatggaaggatgcttcacaaccgatttcatgaatttcatgattgcgcaaagagatttccgcaaagtcaatgatggaaacatctacaacacaagcagagcaattgaaggtgcttacattgagtggatggagcgtttcactggtggcaagaagctttgggcattgggaccattcaaccctttagcttttgagaagaaagattccaaagaaaggcacttttgcttggagtggcttgataaacaagatccaaattcagtcctatacgtgtcttttgggaccacaacaacttttaaagaggaacaaataaaaaagattgcaactgggttggaacaaagcaagcagaagttcatctgggtgctgagagatgctgataaaggagacatatttgatggaagtgaagcaaaatggaatgagttttcgaatgagtttgaggagagagttgaaggcatggggctagttgtgagagattgggcaccccaattggaaattctgagtcacacttcaacaggggggtttatgagtcattgtggatggaactcttgcttagagagcatatccatgggggtgccaatagcagcatggcctatgcactctgaccagccaagaaacagtgttttgatcacagaggtgctcaagattggcttggttgtgaagaattgggcacaaaggaatgcattggttagtgcttcaaatgttgaaaatgctgtgagaaggttgatggaaacaaaggaaggtgatgatatgcgagaaagagcagtgaggcttaaaaatgtcatacataggtccatggatgaaggtggagtttctcgcatggaaattgattctttcattgctcatatcactaaatagctgtatcaagtgatattagtgtggtcctagttgaatatgacagaattttacagttcatgaagttgatgcaaaataggtttggcatgaaaatacacacatatttatgtttctggagacattatctggcaaagtttttgtgatcaacatgctaagccattttgcagaattcttatctatgtattttagaacaatccttgtttggtgtcaataattgtttatccacacgcaaattaaatttttgaatttatatatataatcaaag

SEQ ID NO: 137 - DNA, 2972 bp, Glycine max
aaaaagttaggaagctatgaatcctccttccacactcggggatggccagtgacactaattttacacacttttcttgcaaaagacgcagctccaaatggttggtttagtcatatttgaatactgacttgttgaacggttgttggatggttactgcaactcactaccaactagccaaaccaaaatcaccgtcaattgcaccaattgttttcattctacaatgcgtaacactatcaccgcttcttctaaacgctcttcaatcttcgcattccacagcgacacttcatcactctcttcattcttgttccttctctcaccgtcgccatgttgcgctctctctggcgatccatcgatcgcttctccgttcaacacttccaatacgtaatcaatgaactgcggaagatcaaagttgtggatgaacataacagggaacttgtgatgaatttgttgcaatctgttgtggagattgttacttatggcgatagacaagatccgcacatttttgagtgtttcatggaacggcaagtgctggcagactttgttcgcatacttaagatcagtcaagagtcgaaaattgacggacctctgcttcaatatttgagcataatgattcaaaacatggatagtgaacatgcaattttttattgcttcagcaatggttatatgaacaacattattttgcatccctacaaatttgatgggggagatctagctccatactatgtttctttcctaagggcaattagcaataaaataaacaaagacacactttgccttcttgtgaatgttcagggggatgctgtagtctcctttcccttgtacactgaagctctaagatttgctcagcatgaggaaaagatgattcagacagctatacgtgcattagttctgaacatctacaatgttagtgatgacatggtctatcaatttatatcaactcctccagtttcagaatatttctctgacctggttcgtagattaagcaatctatgcttttgcttagatgattttgtctatgataaagggaaaatggacgctcaaaaacgaagagatggggttattcttgaagctgacaaaattgcagatgaactgcactactttaaagacattcttagtgttggcgaacctcgtttgactagactggttacggaaaatcttctgaatgggcttgtgtttcctctactattctcatttatggcttcaaagaataaaaatggatctgatttgtctgctatcacttcgctatatatcatatcctgccttcttcaggttgttggcggaagaagcatgattaacaatgtggctggtgttatcttgtatcatattttgaacttaaatgtgagaattccaagtgaagggaatgcttctgatgtccatgatgatgttaaaactttttcaaagtgcttgaatgaagtggaaagagttatatgttatgatcctgagtcaaatggatctgagagtatcaatgtaacctatttaggtgctcattgggaaggtttcatgtctagtttcaatattaatagctcaaacagtgaaatttgttccaaaaggagtggaatctttgcttttgttttctgtgaggatcaaagcctattgttagcttcaatatttctcttgcttattctgactgaaagtaaagatcttgattgtctcctatcttcaatgagtgggctaagcgagaaggaggatgagatgttgcagactgatgatacatcaatatctaagtctgtggatgaaagtatcttcattagatttatgcctgagattttaaatgccctgctgaatgttttagccttccagcaacccctttctataatgatgctatggaatgcggggtggtgcttgcaaaagctactcaacttccatagagagggacttaatggtgataatcttctcttattcactcagacttcatatgatcagtcccgtgtaaactttctgaatgaacttggtggagtttggtttgatcatattccagatactctaataacagaatcggcaagctgtgttagagttcttgaacaatcttcccaatataaagatccattatttatgttggagcttgttcttcaccaccaacccaccaatggtcaaacatcttcatattttgcttggcaaaggatggttgatgcagtaaaggtgttctcatttttctttccaattgtcattcagattagttgcagtattttgttaatgatccctttttagtttctacaataaactgagatggctgttcattttaaatacaaggataagaagtttaagtttttaatgggtacttgacatatttacaagtacatccaagagcttgtgctctgttagatttatatattattctcttatatatgaatagatagatttagtccttattactcattatgagattggtcctatgtaatccatactgatcctatttattattgacataggaataacgaaaattgtgctccactggggacctattgtccttggtggacctttctactttgcccgtcttccagcaacctttttctcctttcccagcaacttttccagtcaccactagccgtcgtcacttttccggtgacccactgttccgagggccctttcttcttctccgatgatcttttttgaatgacgacttttccagtcactgccgttgtccgttgccatccggcaccattttgactggtgaccccatggtttgggtcacccattgccaatctattcaacgccatccaccgcacctccataagaaaatcaatgcacccccacatgccaattctttgcgcaacacgtccagccaagcaggttctgtttttggcgcgtgacggcacgttggaaatctgtttaggctgtgcttctggcgacaagcccttctttgcgatgaacagtaccccacacggctactttgcccttgtttggcaaacttccagatgcctttttgtcggagcttacctttgaccattgtcacccatcgtcgatgtccgtcatgt

SEQ ID NO: 138 - DNA, 1882 bp, Glycine max
aaaaatgtgaaagaattgtgctgttcatcactgttcatattacagtttcttgtagatattctgaattttgacttgcttcacttcacctcaacctcttccttgagtaaaaatggaaattgcataaagggcagtgtttttcttgagacgctttctttatattaaagtcgtatattttaatgcatgctgtcgagcttttgttactttgtgacaaatggagggtccttagttctgtttctctttcttctctctgtgctttcaaccaagttctcaaatcactcttcttcttcacccttctgatctgctaattctcaaggtattcaaaattgggtggttttcgattgaactgtgatgtccaagccactgctaggcatagcggaagaggaaggtcaaagcaatgtcactttgttggtttcttcctcagccaccatggaaagtgtgtgcctgaatagctcaaaactgaaagagcgcaactacatggggttatctgattgttcatctgtggacagctccgcgccgtccttctcagatgagactaagagcaatctgaacctcaaggctactgagctcagactggggcttccggggtcgcaatctcccgaacgagattcagatctttgcttgagaagttcgattcagtttgatgaaaagccactgtttcctttgcatcctgcaactgatgaacaccattcctcatcaaagcctgctgttttgggaaacaaaagagggttctcagatgtcatgagtggattcgccgaggagaaattgcttgttagttccgaggtcaacacaatattgccaccaaggccttcttctaatgtggggttgaaaccaagctctatgcttgagaacgtcggggctcagcagcaagccaaagaactcgcaacggtgaaggttggtcacgagaggtctcatgctgtcaacgaaagcagaccaaatcttaatgattctactaataacaatagcagtgcaccagctaccaaggcacaggttgttggttggcctcctataaggtcatttaggaagaattcattggtcactacttcaaagaatgttgaagaagtagatggaaaagtggggcctggtgcactgtttgtaaaggtcagtatggatggtgcaccttacttaagaaaagtagacttgaagaattacaatgcgtatgccgacctatcttctgcgctggagaatatgttcagttgttttaccataggttcttgtggatctcatggaaatctgggaggggaggtgctgaatgaaaccaagctgaaggatctgcttcatggatcagaatatgttcttacttacgaggataaagatggagactggatgctagtgggtgatgttccctgggagatgtttactgagacgtgcaagaggctaaggattatgaagagctctgaagccattggtctagcaccaagagctgttgaaaaaagtaagagcaggaactaggcagaattaagcatctcatcacacccttctatccatctaactgcttgtggggttaaaatgttttcttggctgtgtgagggagcaacacaaggccataatggcttggaagcacaacttaaggcatgtttggactggatagaatttggtactaaagctgccttgttgatcatgatattatttactatcggtgtgttctgttgtcatgatgtttatattcagtaagcttttttcatgattgtcacaacttataaaaccccaaaaacctgtctgtgggaggttcttatattttttatgtgctctcatgttcctgttgtggtgaaggatttgtagtttgtaaattggatcatctcttctatgtttgcaacttggtgtgataaaaaacaagaagttattatatatgtaatgcaccttctactgtttctcttttgtcaaa

SEQ ID NO: 139 - DNA, 2114 bp, Glycine max
caaagtatagattgctagctatatatcaaagaaaaagcttgctttgtgtggaggctgcagagaaaattcaaggtggtgttcatggccatgatgtggattagagtcatacttatactagcggcttgcatgcttcccctttcagtggaagccatggttcgccactacaagttcaacgtggtggtgaagaatgtcacaagattgtgttcaacaaagcccatagtaaccgtaaatggaaagttcccgggccccaccatctatgctagggaagatgacactgttttggtgaaggtggttaaccatgtcaaatacaatgttagcatccactggcatggagtgagacaattgaggacgggttgggccgatgggcctgcttacataacccaatgcccaattcaaccgggccaggcctttgtgtacaacttcaccctcacaggacagagagggacactttggtggcatgcacatatcctttggcttaggtcaactgtgcatggtgccttggtcattttgcctaagcttggagttccttacccttttcccaaaccccacactgaaaaagtcatcatattgagtgaatggtggaaatctgatactgaggctgtaataaatgaagctttgaaatctgggttggctccaaatgtctctgatgctcacacaatcaatggtcatccaggatccgttcaaaattgtgcatcacaagggggatacgaacttcaagttcaacctggaaacacctacttactaagaataatcaacgctgcactgaatgaagagttgttctttaaaattgctggccaccaactcacagttgttgaggttgatgctgtctacacaaaacctttcaaaactgacaccatagttatagcaccaggccaaaccacaagtgtgcttctaaaagccaaccgtgccgctggcaaatacttagtagcagccactcctttcatggattctcctattgcagtggacaatgtgactgccactgccacattgcactacactggctcactaggttccaccatcacaaccctcacttcattgcctcccaaaaatgccacaccagttgctacaaacttcactgactcactcagaagcctaaactccaaaaagtaccctgctagagtgcctcaaaaggttgaccattccttgttcttcactatcagccttggagtcaacccttgccccacttgtgtcaatggtagcaaagtggttgcagctatcaacaatgtgacctttgtgatgcctaaagtttctctcctccaagcacatttcttcaacataagtggagttttcattgatgattttcctgggaagcctccagtggtttatgacttcacagggacacaacagcctacaaatttgaggactaatagagggacaagggtttatagacttgcctataactccactgttcaattagtcttgcaagatactgggatgataacacctgagaatcatcctcttcaccttcatggattcaacttctttgtggttggtaggggacaagggaacttcaaccccaaaaaggacaccaaaaagtttaatcttgtggatcctgtggagagaaacacagttggtgttccatctgggggatggactgctatcagattcagagctgataatccaggtgtttggtttatgcattgccatttggaaattcatacaacatggggattgaagatggcatttgtggtggacaatggtaaaggaccaaatgagtctctactaccacctccaagtgatcttcccaagtgttgagaagaggactaatacacaatcttcgcttaaagaggaagaggggcaaacatgtaaagaaaatataatttccaaagggagtgtgtaccatcaaggctaataacaagattttcttgtagcaaataaaaaaggataagctgctaatagggaaaataagaccaattaacatgtcttcactttctatgttttttccctgtcattttttgcattatttgtacttctcatctctctccttgaaagatagttttggcttcatgtaattatatatacagtgtgaatcaaaatttacaggattttcagaatgccttgctttacgtacttgcatcagaagttctgttaacttgtttatttgtacaattgta

SEQ ID NO: 140 - DNA, 1749 bp, Glycine max
atgtgtggtattcttgctgttcttggttgttctgatgactctcgagccaaaagggtccgcgtgcttgagctctctcgcagattgaagcaccgtggccctgactggagtgggctccatcaacatggtgactgctttttagcacatcaacggttagccatagttgatcctgcttctggggatcaacctctctttaacgaggacaaatccgtcattgtcacggtgaatggagagatttacaaccatgaagagctcaggaaacagctgcctaatcacaagttccgtactggatgtgattgtgatgttattgcacacctgtacgaggaacatggagaagactttgtggacatgctggatggtatcttctcatttgttctactggacacccgtgacaacagttttatagtggctcgggatgctattggggtcacttccttgtacattggatggggattagatggctctgtttggatttcatcagaaatgaaaggcctgaatgatgattgtgaacactttgagtgttttccacctggtcacttgtactctagcaaagaaagagggtttcgcagatggtacaatcctccttggttctctgaggctactccatccaccccttatgatcctctcgttttaagacacacctttgagcaggcagtcataaaaagattgatgactgatgtgccttttggtgttctactctctggaggtttggactcttcattggttgcatccgtcacttctcgctacttggccaacacaaaggctgctgagcagtggggatcaaagttacattcattctgtgtaggccttgagggctcaccagatttgaaggctgcaaaagaagttgctgactatctaggcactgtccaccatgagtttaccttcactgttcaggatggaatagatgccattgaagatgttatctaccatgttgaaacatatgatgtgactacaattagagctagcacacccatgtttctcatgtctcggaagattaaatcacttggtgtcaaatgggttatctccggagaaggatctgatgagatctttggagggtatctgtacttccacaaggcacccaacaaggaggagtttcacagagaaacatgccgcaagatcaaagcactccaccaatatgattgcttgcgagccaataaatcaacatttgcttggggtctagaagcccgtgtaccatttttggacaaggcatttatcaatactgcaatgagtattgaccctgagtcgaaaatgataaaaagagatgaaggacgaattgagaagtggattctgaggagagcctttgatgatgaagagcatccttatctgccaaagcacattttatacaggcagaaagagcaattcagtgatggagttggctatagctggattgatggccttaaggcccatgctgcaaaacatgtgactgacaaaatgatgcttaatgctggtaacatctaccctcacaacaccccaacaaccaaggaagcatattactacagaatgatctttgagaggttcttccctcagaactcagctaggctcaccgttcctggaggagcaagtgttgcatgtagcacagccaaagctgttgagtgggatgctgcttggtctaacaaccttgatccttctggtagagcagcacttggagtgcacatttcagcctatgaaaaccagaacaacaacaagggtgtagaaattgagaagattatacctatggatgctgctcctcttggtgttgcaatccagggataa

SEQ ID NO: 141 - DNA, 1955 bp, Glycine max
aacgtgtctctctcaaacacacaagccaaacccaaacacaacaacacaaagaaaaaaagagcacaaacagaccaattccaacggttgaattttttggctgaagacaccccaccgacgttagtcaaataaaacatgtcttgctccgtcgcggtttccaattcgccggtgttctctccttcttcttccctcttctgctcgaagccctccatcatctcttcttcgccggaatccctctcgctctctctctcgcatctcaaaccttccaactcttctacgacgtcgtcttgttcttcaccctctgctgctgcttcttcatcttcttctccttcttctccgtttcggcttcgccttcccaagcctcccaccgtgttctctgcttcttcttctgcttcgtctacctctccgaacggcaccgttttgaagaggaagcgacccgctaggttggacatacccgtttcctctctcacctttgcggttccgcccacgccctccgcggcggcgcgtgacttggtcgaggctgaggaagatgggtttggggtgtactgcaagagaggcaggagggagtacatggaggatcgttacaccgctgggaataatcttcgcggagaacacaaactggctttttttggcatatttgatgggcacggtggtgcaaaagctgctgaatttgctgcaaataacttgcaaaagaatgtgttagatgaagttattgtgagagatgaagatgatgttgaggaggcagtgaagcgtgggtacctgaacaccgattcggatttcctaaaggaggatctccatggtggctcttgctgtgtgacagcattgattaggaatggtaacctcgttgtgtccaacgcgggtgattgccgtgctgtcattagcagagggggtgttgctgaggccctaacatctgatcacaggccttcaagggaagatgaaagggacagaattgagagcctggtaagcttctgagtgtgatagtactttatcttttctgtctggtcattgaaaccacatcaacatgtttgaatttggatttgttggttattaaaagcattggaatttgtcttgcagggtggctatgtcgatttatgccgcggtgtttggaggatccagggatctctggctgtgtcaaggggaattggagatagacacctgaaacaatgggtgacagcagaacctgagaccaaagttctccgaattgaacctgaacatgacttgttaattttagcttcagatggattatgggataaggtatagaacttgtccatttcacttcacaatatctatagtgtctttattcaagtattgttcaatatttgttgctcatggattggactggtttcactaaacaagtttctttctcattctcatttcaggttggtaatcaggaagcagtagatattgctcgttcttttctcgtaggcaacaacaaatcacaaccattgctgcaggcttgtaaaaagcttgtagatttgtctgtttcacgaggctctttggatgatacaagtgtcatgctaatcaaattggagcactatatttaaagttaccttagtacaactaaggtttcaagattattgcagttgagatcgcattgaggtcaagattgcgttgcagtttgtgatttttgaacaaccttggtggtgcctgatgatggatagagagtagctgattcttttctgtatatataaatctgactaccttattggaattttttgtacccgcgtaggggagggatattaacaataacatttagtaattatttttttcatagaataatttatgtaataagcataaagttaattaatttatacattatttatttagtaattcatttattttttacactgaagttttctaatttgtgatggattacagtttcccttttaagtacataaatgcaaaagttgttgtagaatgattcaatcaatgaatctctcaaaatttatcagtcagcc

SEQ ID NO: 142 - DNA, 1575 bp, Glycine max
aattggtaaccatctaatagctatctttctgatgagggaaggggagacaatgctacaggaagagaatgagtctgagatcatcacatctcttaagaaaaaacttgaagtccacatggcaaggaatgagttactactgaaggaaaatcaggaactcagagaagaagtagttcggttaaagtcacagataatttcacttaaagcacacaacatggagaggaaatccgttctatggaagaagatacagaaatccatagatgacaacaacaattcagaagcacatcaacaacataaagcaccaccagttcaggtaatcacaggtgaaaagagttcacagtatgagaatgtgcatacaaatccaaatttcaaagacacaacacctaaaaaagacaaaccagcagcaatagtaacaccagctccgccaccaaggccttctcccaccctccttcttcctttacataaaaaagagaaaggacttaaagtgcagcaagcaatagcaccaccaccacctccaacaccaccaaaattatcatcggttgggttaaaaactctgcgccgtgtgcctgaagtaatcgaattgtatcgttccctaacacaaaaggatgctaacatggaaaacagaatacattccaatggaattcccacagtagcattcaccagaaacatgattgaggaaattgaaaaccgctcaacttatctctcagctataaaatcagaagttcaaagacaaggggaattcatcagtttcttaattaaggaggttgagtctacctcttttgcagatgtttctgaggtggaagcatttgtcaaatggctagatggggaactatcttcattggtggatgaaaggtcagtgctaaaacattttcctcaatggccagaacaaaaagtagatgcactcagagaagcagcttgtaactacagagatctgaagaaccttgaatctgaagtttcatcctatgaggacaatcccaaagagtcattggctcagactttgagaaagatacaagcactgcaagacaggttggagagaagtgtaagtgctaaagagaggatgagggagagtactagcaagagatacaagaatttccatatcccttgggaatggatgctggacataggcattattggtcagatgaagctaagttcattgaggctggcaaaggaattcatgaaacggatgacaaaggaattagtgtcaaatgaacttttgcaggaagataacctttttgtacaaggagttaagtttgcattcagagtgcaccagcctttcagtttgcaggtggctttgatcttgagaccatacaagcatttcaagaattgaagaagattggttgtgctataccaagctatagtaatctgataaaatgccccaaacttgttaaaacttgccagaaacctgtatgttaacttaaattgtcttctcttaattatttgatgtatacacattagccgcggaattgagaaaatgtatatgctatgtaatttcttaaagcattgcctacttttggatattaggtatatgctttcttaattatgcaagagataaatcctcattagtcattgtgcaagtgataa

SEQ ID NO: 143 - DNA, 4183 bp, Glycine max
acggatgcatgtatgtactcatgttccaattcaggaaaaaaaagaaaagaaaaactcattctccatttcactagtgctcctccaagttaacgcctttctgggctactggcaccgtctgtctgggaaacgcgaaacctcaatggcaatggcaattgctcatagcacgcactctacacttcccagcgcgaaaccctagcttctgagtagcagagttttctttatcgtgttccactccctcgaatccgatcacttttcctcttcaatttcgctcttgctgacctttatcgtgccaattcgctgaaggtgaacaacaacaacaatcctcttagctctattcctctcatgtttccccaatcggtgccataatattaagcctgggagaaaccttaatggctcactgttctaacaaggataatgacccaagtgcatctcaattaagttggtggtatgtagatatatcttatcaagaactaaaaaagggaagttacaaagtgatgcgctcagatgaaactttcatttgtccgtactgtcctgagagaaaacaggattataagtacagggaactccttaatcatgcttctggggtgggtcggagtagttcagaaaagagaactgcaaaagagaaggctaatcatctggctttagtgaaatatttggaaaaggatcttgtacatatggatgtcccatcaaaacctgtagataaaggtgccaaattattaagcccaggagaaaccataatgcctcactgttcaaacaaggacactgatataagtgcatctcaaataagttggtggtatgtggatacatcttacgaagaactcaaaaacagaagccacaatgtgaaaacctcagatgtgactttcatctgtccatactgccctaggagaaaacaggattatttgtacagggaactcctagaacatgcttatatggtgggtcggagtagttctgaaaagagaagtgccagagagagggccaatcatctcgctttagtgaaatatttggaaaatgatcttattattatggatggcccgccagaacctgtagataaaggtaccaaattaagcctaggacaaactgtagaggctcaatgctctaacaaggagactggtatgagtgcatctccaataaattggtggtatgtagataaattttacaaagaactcaaaaagggaaatcacattgtgcaaacctcagatcagactctctcttgtccatactgccctagaaaaagaaaacgggattatgtgtacagggaacttcttgagcatgcttctggggtgggtcagagtagttcacaaaagagacatgtcagagagaagaccactcatctggctttaatgaaatatttgaaaaatgatctcaagtatatgaatgatccatcaaaatctgtgaatgaatgtaaccccccagttaacaggggggatcagagcagttcacaagagagaagtgtcagagaagacgctactcatctgccttcagtgaaatacttgaaaaaggatcttacaaatgtgagtggtccatcatcaaaacctgtaaatgaaggaaccataacagtaagcccaggagaaactgtaattggttgctgctctaacaaagatagtaatataagttcatctcaaattgtgtggtatgcagaaaatttttatgaagaactcaaaagggggatacacaatgtgaaaacctcagatgagactttcaggtgcccatactgccctaataaaaagataaaccgggattatgcgtacagggaaatccttgaacatgcttcgggggtgggtcagagtaagtctcaaaaaagaagtttcatcgaaaaggccaatcatctggctttagtaaaatatttgaaaagggatcttatgaatgtgggtgctccatgtccatcaaaacctatggatcaaggcaccaaaacaataagcccaggagaaactttaatgggtcaatactctcataaagacaataatataagggaatctcaaataagtgggtggtatgtacataaatcctatgaagcactcaaaaagggaagccacaacgtgaaaacctcagaaatgactttctcttgtccatactgccccaataagaagagaaaacgtgattatctgtacagggaaatccttgaacatgcttccggggtgggtcagagtagctcagaaaagagaagtgccattgaaaaggctaatcatcttgctttaataaaatatttggaaaaagatcttatgattgtggatggtccaccaaaaactgcagatgaaggcagtcctcctttcaattttgagaagcagtttgtgtggccatggactggggttgtggttaatattcctactagactgacagaggacggacgttgtgttggggaaagtggttccaagctgagggatgaataccgaagtaggggatttaatccaagaagagtccgcattctttcaaatttctgtgtccactctggaactgcagttgtggaattcaataaaaattggacagggttagataatgctttagcatttgaaagagcatatgaattagatcatcatgggaaaaaagactggtttgctaatacacagcataagtctggtatttatgcatggattgctcaagctgatgactacaagatgaacaatatcattggggaacaactgcggaagatggtggatatcaaaacaatatctgaacttatggaagaagaagctcggacgcaggataaacttgtgtccaacttgaataacactcttcaggtcaagaagaagcgattaaaggaaatggaagtaaaatattatgagacttcacgtcgtatggacattgtaatgggggaaatagataagctcactcaaggtcacaatcaagagatgaagaaaatacagtcaagtgcaactcaacacttccagaatatttttaatggtcatgaaaggcttaagttgcaactagaatctcagaaaagagagcttgagttgcggagaattgaattggaaaaacgtgaggcacgtaacgaaagtgaaagaaaaaagttggaagaagagattatggagaatgcattgaaaaatagctctcttgacatggctgttctggagcaacagaaagctggtgaaaatgttttgaaactggctgcagatcaaaagcggcaaaaagaacaatttcatgctaaaataatcctgcttgaaagacaactggaagtgaaacaaaaactagaattggagattcaacaactgaaaggaaaattaaatgtcatggcgcacatagaagatgatggggactcagaagttttgaataaggtggatgctttacataaggatttaagagaaaaggaacagtcactacgagacttggattccctgaaccaaacactgattattaaagagcgtcagagcaatgatgagctacaggaagctcgaaaagaattgattaatggcattaaagagatatcttgtcgtgctaatgttggtgtgaagagaatgggggagcttgatattagaccattccttgaagctatgaagataaaatataataatgaggatgcagaagatagagcttcagaactgtgttcgttgtgggaagagtatataagggacccagactggcatccatttaaaattaccataattgaagggaaacatcaggaaatcatagatgatgaagatgaaaagttgaagggactgaaaaatgagatgggtgaaggagtctacaaagctgtggtgacagctttgacagagataaatacatataatccaagtgggcggtatataacctctgaattatggaattacgaagagggaaaaagagctaccttgcaagaaggagtaaaattgttattgatgcaatggaaactaactaaacaaaaaagggggacaatgtgaaggccgccggaataaataaacatgttgctttcgcagaagggctaaatgggctttgaagccaagccgtcacatctaagggctgaatatttaaggaatacaggttgtatttaaactaattttctctttccactccataattctatggaggttcttttattaccaatctgtgttcataacaattatgcttactgtttaggtcaagttccatctttgacctaaacttacaattcagatccctaaatgtgtgaaacattcaatgtaaagtgttgagatatgataaaaataggctactaagataaataaaaattatatttcctaaatcagcaacataa

SEQ ID NO: 144 - DNA, 2394 bp, Glycine max
ttaaagttaccttgcaatctaaagagtgaaaactgaaagacagcaacattgtgtccaccaaagagcctcacaaaaccaccaccacccctccttcacctgactgagactggtaccaactttgtttgaaggctttgagatcacgtatagtcccaaacacaagaagaagaaaatgttcaaagtggttactaatgcctcacaaaggaaccaaaatcacaacaaataaaataaaagaatgttcataattaaaaaatagatcaatagatagatagttcatagcttgagaattgagaaagacaactttccctcctccaccaataacctcttgaaagacaagaccatctcaccaaaccttaattaaacgaacaaacccaacctaatactattatttgaaattaatttcaatgtctctcgttgctgtgatcatccctatatttttacctctctttgcttcttcttttctcagagattattgctattattattctgatatcaacctctttcttcttctctctccctcatgcagcctcttcgaagaaaaactcctctattcacctcagaaatggggacaatgaagggtcgcaagaacaacaacctctccatcttcgtggtggtgttctccatcttcctctttgggctcttcatgtacaacgaggatgttaagtccattgctgaattcccattctcgagtcccaaagcgcatgagacacaagaaggaggagaacctaataaacatgttgattctgttcaagacagtgttgttgttcaaagggagagtgagaagaaggatgtggaagacactgccacggtaaaagtttcttctaagaggagtacttcaagggctcagctagagaagagtggtgctgaggatgaggattctgatgagcgtgttgatttgaaaactgttgtggagaaggagaagaagattgaaatgccacgtgcggaggaagaggaagaggtggaagaagaagaagaggaaaaagaagaagaagaagaagaggagaaagttgagttgccaccagaagattgtgacttgttcactggggagtgggttttggataacgtgacacaccctttgtacaaagaagacaagtgtgagtttctcacttcgcaagtgacatgcatgaagaatggacgaccagattctttgtatcagaattggaagtggaagccaagagattgttctctgccaaagttcaaaccgaagcttttgtttcagaagattagagggaagaggcttatgtttgttggagattcactgaataggaaccagtgggaatcaatggtttgtatggtcaattctgcggttccttcacataacaagacctggtacaagactggttcacttgctatcttcaaaatccaggagccggagcacgttaccacggtggaattctattgggcaccattccttgtagagtcaaattcagatgatccaaacatgcacagcatattaaaccgtataatcatgcctgaatcaatagaaaaacatggagtgaattggaaggatgtggactacttgatctttaacacctacatatggtggatgaacactttctctatgaaagtcctacgagggtcatttgatgaaggatccacggaatatgatgaagttcctcggccaatagcatatgggagagtcattaacacatggtcaaaatggatagatgacaacattgacccaaatcgaaccaaagttttcttcagcagcacgtcccctcttcatatcaagagtgagaattggaacaacccaaatggtataaaatgtgccaaggagatcactccggttctcaacatgtcaaccccattggatgtagggacagatcgtcgcctttttacaattgccaacaatgtgactcagtcaatgaaggtgccagtgtacttcattaacatcacttctttgtcagaattgagaaaagatgcacacacttctgtttacaccatacgccaaggcaaaatgctaactccagaacaacaagctgatcctactacttatgccgattgcatccattggtgtttaccaggattacctgacacttggaacgagttcctctatacaaggatcatctctcaatcttgacctacaacaaacaacctatagatatcttcacacatacttttattctcttttccctctttccttaattgttattatttctccttttacttatgaagaatgctcttttttccttgattgccttagcctttgtttcaatttttgtaatttttaacaattttttattgactttatttttctttttaggaattgggcattttaccccttttttcctttgttaagccaatttagccaagcacggaagcacagcaagatccttaaatgtacaatgaatcttttctccttgaatgaagagaaaataaagaacaaaggttttgttt

SEQ ID NO: 145 - DNA, 1074 bp, Glycine max
atgaagtcaatgagagtaaacagtgacttggtgttgataactggtagcatatggttcctcgtcttcttcgagtccatattcttagactgtccgaaacatatatacttggttttttggttctacaaacaactcaaaagctctcataatattattgtgtcacatacaataatgtctcactccattaattcagagtcggagtttgatcctaagcaaccctccgtgcccatatcgtatccaataaagaccctcaaggatctggaatcacgctcctactatgagtcctttcactaccctttcaacaaagcttcagttccaattgaaagtggccattctgcaccgttgcctaatcgtagaagaatactagtgtgccatgatatggctggagggtacttagatgataagtgggtccagggagggactaatgctgaagcctatgccatatggcattggcatttgatagatgtgtttgtctacttctctcataatctcgtcactctccctcctccttcttggactaatacagctcatcgtcatggtgttaaggtgctggggactttcatcactgaaggggatgagggagcggttgtctgtgatgaaatgctttcaacaaaggagtctgcccaaatgtatgcaacaaaggagtctgcccaaacacttggctgagcttgctgttaatttaggctttgatggatggctgttgaatatggaggtatcattgaagccaaaacagatttctaatttgaaagagtttgtcaatcatttatcattaacaacgcattcttcagtgcctggatcactagtgatatggtatgacagtgtcactattaatggtgatctatggtggcaagatgaactaaatgaacataataagcctttctttgatatatgtgatgggatatttacaaattacacatggcaggaagactatccaaggcgatctgctgctgttgctggtgatcgaaagtttgatgtgtacatggggattgatatatttggaaggaacacatatggtggtggaatgtggaatgttcaggaatagatattgtgttctttgcattcaaattcattaataag

SEQ ID NO: 146 - DNA, 3934 bp, Glycine max
gcaaagtgtataaggtttaaaaattgacgatttaacagagcaaacaaaacacagaaacaatagcagtagctgcacccagttggatttgttcaatggaaacgacgacgaagaacaaaagagagaagaagaaaggagagccacttttccgtcaaaaccccaacgttgatgaagtcaccaggattcgcatttcccagattctagaacacttccgagcttccaatgatgaagtctacaagtttgatgctgatttgtccaaccaagagcgtgctttggtgcatcaaatggccctcaaaatggggtttagatctaaaagttacgggctagggaaggaaaggagagtgtgtgttcaaaaaatgaaaaagaaggttgacacggataacgggtttggaagtcttcctcaattcacattttctggagaggcaaagtgggtgctgggtgatttgtttgctcattatccgcctggcgatggaaactcatgggagatggtcggagaaaatagtgacactgctactgacagaacaaaacagaggccggatgatattttcagcaggccctctatgaccaaagctgaaattgctaggagattggaagctcttacttctagaatgaacaatgtctctaacttgaaacaggttgttctaatatctggtgagactggttgtggaaagaccacgcaggtcccacaatttattttggatcatatgtggggtaagggagaggtatgtaaaatagtttgcactcagcctcggcggatctctgcaacttcagtttccgagagaattgctagtgagagaggagagactattggagaaaatgtgggatataagatacggttagaaagcagaggtggaaggcaatcatcaattgtgctatgtactactggagtgctattaagggtgctggtttccaaaggttctcattcgtcaaagattgggcgtgtgaaggatgagatttctggcatcactcacataattatggatgaaattcatgaaagggatcgatactcagacttcatgttggcaatcatcagagacatgctccctttatatcctcacctatgtctgatattaatgagtgctaccattgatgctgctagattttctcaatattttgggggctgcccaatcatccatgttccgggcttcacatatccggtcaaaactttctatttggaggatgtactttctattgtaaaatccaggcctgataatcatcttgatagtaccacatgtagtattccaaaaaccacttgtgagctaagtgaagaagagaagctttccattgatgaagctattaatttggcttggtctaatgatgagtgggacctgctgttagaattggtttcttcggaaggaaccccagatctatttcattaccaacattctttaactggccttactccattaatggtgtttgctggaaaaggtagagtgggtgatatgtgcatgctcttatcttgtggggcagattgccatttaagggccaaagatggaatgactgcattggagattgctgaaagggaaaaccaaccagaagcagccgaaatattgaagaagcacatggataatgatttttccaactccatagaagagaagaaattacttgataaatacctggcaacagtcaacccagaacttgttgatgatgttttgatagagcagctgataagaaaaatatgtattgattcaacagatggagggatccttgtttttcttccgggctgggatgatataaatagaacacgtgagagattgcttgcatcaccttttttcaagaattcctcaatgtttatgctcatatctctgcattcaatggttccaagcatggaacaaaagaaggtttttaggcacccacctcatggttgtcgcaaaattgtactatctaccaatattgctgaaacagctatcaccattgatgatatagtgtatgtcatagacaccggacgaatgaaggaaaaaagttatgatccttataacaatgtgtcaactcttcagtcatcttggatttcaaaagcaagtgctaagcagcgagagggacgtgctggccgttgtcaacctggtatatgctatcatctatattcaaggactcgagcagcttccttgccagattttcagattccggaaattaggagaatgcctattgaggagctttgtctgcaggtaaagttgcttgatccaagttgcaaagtagaagaatttctacgcaagacattagatcctccagtttttgagtccataagcaatgctattttagttcttcaagatattggggctttttcaaatgatgaaaaactcacccatctaggggagaagcttggttctcttcctgttcacccattaatatgcaggatgcttttttttgctatattgatgaactgccttgatccagctttaactcttgcatgcgcatctgattatagagatccatttacacttccaatgttacctgaagaaaagaagagagcttcagctgccaaatctgagcttgcttctttatatgggggttgtagtgatcagtttgccgtattggctgcatttgaatgctggaataatgcaaagaaaatgggtctagaagcacggttttgttctcagtattttgtgtcttcaagcgccatgaatatgttatcaggcatgcgcaggcaactccaagcagaattaattcgaattgggtttattcatgaagacgtgtcaggttacagtgtgaatacacatgaccctggtgtgctccatgcggttttggtagcaggtttgtatccaagggttgggagatttctaacaaataaaggtggaaaaagggttatagttgaaacaacaagtggagataaagttcgcctgcacaatcattccacaaattttaagttgtcattcaagaaaaatttagataacactttaattgtgtacgatgagattactcgcggtgacgggggtatgaacataaggaactgcacagttgttggaccacttccacttttgctgctttcaactgagattgccgttgctccagcagaagaaaatgacgagggggatgtggatgatgcagtaggtagtgaagatgaagctggaagtgaagatgggatggagtttgatgccgagtccagtggaggccgtgaggataagttgatgtcttctcctgataatatggttaaagtaatcatggaccgttggctttattttcgttcaacagcaattgatgttgctcagctatactgcttgagagagcgattatcagcagcaattttatacaaagtcacacatccaaggaatacacttcctcccatcatggcggcatctgtgcatgctatagcttgtattctgtcatgtgatgggtgcattggtgtgtcagcaatgttagaaggtgtggacacactaaccactatggtaaacgcaacgtctttgggcaagccagcaacaggtactaggcgttttggtaagagaccaaaaggatcccttgcagagcttttaaattacgacgggcgccaaaactctgggcctcatttcaaagcataggaagttcaagtgggatcaaccccaaacctgaccctgctttctcaccataatggtctaaacggaagttgattgtatgctcagttttgaaagaagcttatatagaatacaaatcctaacagtgaaagttaaacttgcgttcagcttatatagagaacaaaattctgacagtgaaaattttcagtcagaagattgcctttttgttcattgtgcaaacaatgccttcttgttcttggtcagcagatgtttgtgccacaacttccaggtgtgtgcgcggtgagatgagatgatggattctggacacaattgagggatcatttaagtgtgaacgtttaatatgaagagtagaatgtagaatagttaatgaaatctcatattataaaatcagaagaggaatgaaatctatgtgctgtaggctttgagctgatcat

SEQ ID NO: 147 - DNA, 3700 bp, Glycine max
agagatcttttttaggatggttgttaaccccgcgtttgaaggatcagaattaactctagatcctttacagaacaaaaaaatgcaatgcataatataaatactcatattggctttggcatagtttttttgtcacatgctcccaaccagagtacagtagctaccaacatcaccatttatgcaacccactgtctatcctcatctgatagcatagcatataatagactctgactcactccctatcattttcatcctgcttgaacaaccaaaaagagttccactctccgaaaagtgaaaacactttcatggagattaacttagattattccaagatgctctttttactcctccttggttccacttcattgatttttttcttcccacaattggcttctgctgccactcccaagctcaacactcaagaggtgaaggcattgaaggagatagggagcaagattgggaagaaagactgggactttggggtggatccttgcagtggaaaaggaaattggaatgtgtctgatgctaggaaaggctttgagagttctgtcatatgtgattgttccttcgatcacaattcttcttgccatgtcgtaagcatatccttgaaggctcagaatctgtctggtagtctctcaccagatttttccaagcttcatcatctccaagaattagatcttagtcgtaacatcatcactggggctatacctccacaatggggtaccatgcgcttggttgagctctcttttatgggaaacaaattgtcagggccattccccaaagttctcaccaatatcacaaccctcagaaacttgagtattgaaggaaatcaattttcaggccacattccaacggagattgggaagctgaccaatttagaaaagctcattctgtcatccaatggattcacgggagcattgccacccacgctttccaagttaaccaagttgattgatttgaggataagtgacaataatttctttgggaagattcccgatttcattagtaattggacattgatcgaaaagctgcatatgcacggttgctctcttgagggtcccataccttctagcatttctgccttgacaagattaagtgatttgaggatagctgacctaaaaggtagtaaaagctcagctttcccaccactaaataacttgaaatccatgaagacactggtattgagaaaatgcatgattaaaggagaaatcccagcatatattgggagaatggaaaaactgaaaatcttagatttgagttacaatggcttgagtggagagatacctgaatcttttgcccaacttgacaaagtagacttcatgtatcttaccgggaacaaattatcggggattatacctggctgggtccttgcaaataacaaaaacattgatatctctgacaacaacttctcctgggacagctcaagtccaactgaatgtccacgcgggagcataaaccttgttgagagctactcttcatctgtaaatacacaaaataagattcattcatgcttaaaaaggaactttccatgcacatcttcagttaacaaatatcattactccatgaacattaattgtggtggtaacgaagcaaatattagtggtcaaatctatgaagctgacagagaacaaaagggtgctgcaatgttatattacaccggccaagattgggctcttagtagcactggaaacttcatggacaatgatattgactctgatccatatgttgtggccaatacttctagactgaatgtctctgcactcaattcacaactatatacaacagcgcgtgtttctccccttgctctcacatactatggcctctgcctaataaatggaaattacacagttaagcttcactttgctgagattattttcatcaatgataggtcactttacagtcttggaaggcgagtatttgacgtctatatccaggggaatttagtgctgaaagactttgatatccaaagagaagctggtggtactggcaagccaattgtgaagacattgaatgctagtgtcacccaacacaccttggagattcacttctactgggctggaaaaggaaccactggcatacccacaagaggagtttatggacctcttatatctgctatttcagttaaccctaattttaaacctccatcaggggatggcaaaagaacttatttcatgctggccatcggcatagtagctggtgttttagtggttgttcttctggtactggttctcatgaggaggatgggatggttaggaggcaaagatccagtgtataaagagctcaggggcatagatctgcagacgggattatttacactaagacaaatcaaagcagcaacgaaaaactttgatgcagagaataaaattggtgaaggtggctttggttgtgtttttaagggcctattatcagatggtacaataatagcagtaaagcagctttcttcaaaatctaaacagggaaatcgtgagtttgtgaatgagatgggactgatatctggacttcaacatcccaatcttgttaagctttatggatgttgtgtggagggcaaccagctaatactgatatatgagtacatggaaaataattgtctatctcgcattctttttgggagggatccaaacaaaacaaaactagactggccaacaaggaagaaaatttgtcttggtatagctaaagctttggcttatcttcatgaagagtccagaataaaaatcatacatagggatataaaggcaagtaatgtattgttggacaaggattttaatgctaaagtctcagattttggcttggcaaaactaattgaagatgacaaaacccatattagcactcgagttgcaggaacaattggttatatggctcctgagtatgcaatgcgtggctatctaactgacaaagcagatgtttatagctttggggtggttgcattggaaactgtcagtggaaagagcaatacaaatttcaggccaaacgaggattttttttaccttcttgattgggcatatgttttgcaagagagaggaagtcttctagagttggttgatccaaatttgggttcagagtattcaactgaggaggccatggtggtgctaaatgtggctctcttatgtactaatgcatctcctacacttagaccaacaatgtcccaagttgtgagcatgcttgaaggttggactgatattcaagatctactttctgatccgggatattcagctatcagttcaagttccaaacataagagtataagaagtcacttctggcagaatccaagcggaacacatagcatgtcaatacctagtattgatactgatttctctggctcacatgttgaaacagataagagctatcttcccgtaaccgttaattcagatggatcagacaagtgaaattagtttcttaatgccacatttaatacaaaactcgtggtgtattcaatgaaagaaaagagagagaaaaaaattaaaattaataaccatgtaaatactaaagagttttatcttgttgctctcgttcgcccaaaatttggggtgccatcatttgaagctatggttatgtacctattcccatcacactggggtgccttaatttagggttagttacaatttacgttgacatgtgagattgctaacattacagtctctaatacattatctattgcttaaatttatcaaaagctacaaaatcatgtgtggatgtcattaaacaa

SEQ ID NO: 148 - DNA, 2695 bp, Glycine max
gggtggtggtgacatggcgaaccatctttactgcaacttttattctgacagaattttacgtaacgctcctcacaagtcacaatgctacgaatatatcatcgtataaaaaccattttaactgaattagaggaatcttgaataggaacgcttgcacatgattattccctttttaactctgagagtctgaacctgacatgctgatgcaaaatttgtctttaaacacaccacaccttttcgcagttttcacttcagccaaactcatctctctttgtttctttctctttctttccctcctcacaagtttgtgaagattcttccccgcgatttcactctgcaattcaatgcaacactttccatgccctcttgaaaattttcaacaagcacccctttgaaaggttggcttcaaaggccggtattattatttaaataaaagacactatggtagccaaaatcaggcaaagtgctgctaactctccaaatccaacaaaaccagtggttggagagattgacaccagtccaccttttcaatctgttaaagatgctgtttctctatttggtgaaggtgctttctctggtgaaacacctcccaatgctcccattaagaaggccaaatcttattttgctgagagtgtttgggcaaaggagagacaacttcacttagcccagaaagatctgaaaaaattaaaggaacaactaaagaatgcagaaactaccaaagctcaagtcctggtggagcttgaaaaggctaaaagagtggttgaggatctctcacaaaagcttaaagttctcagtgaatccagagaatcagcaattcaggcaacggaagcttcaaaaagtcaagcaaaacagcttaaagaagaaaaatgtggtgatcctgatggaaccaatcatgcttggaaagaagagttagaaactgccgttaataattttgcatctgtaattacagaacttgatgttgcaaagcaagaactgagtaaaattcgtcaggggtatgatttatccttggaagcaagagtttctgctctcaagcaaacagcagaagctgaagatgcaatgaaggcaaacatggaaagagcatgtgaggtatctaaagaaattttggttgtgcaggaatcagttgagaaaatgaatgctgaatctgtccaagcacatcaactgcaagaagagacattagccggacaaaaagttcttagacaatcatatgaagccatccttgaagaatcaaaaaagaagttgcttgatttaaagaaggaatttaatccagagcttataaaaaatcttgaagtgcagctcactgagacaatgattgaaattggggttttgcaaaagcaaattgaaaacaaaaagacatcagacttggactctttgagaagtgtcactcaggatcttggtgatgctaaggaatcactgcagagagtaacaggacaggaagacacccttagaagcatggtggaagctcttgggatggagctggagaatgtaaaaagagaacactctgaattgaaggagaaagaatccaaaactgaatccattgttgagaatctgcaggtagagctctggaaaagcgagtttgaacttgaagcctacttggcaggagaatctaaagctagaggcgcatcagaggaaatgatcttgacattgaaacagttgttttctgaaactgaaaatgcaaggagggaaatagaagatatgaaaaatgagactgcagaattgaagatggaagctgcagtcactaaacttgtgttagaagatgcagaaacaaagcttagagtagcggtggaagaagtggaagcagctaatgcagcagaggcaagtgctcttgatcagattaaggtcttatctatgagaactagtccttctcattcatcaccttctgaacctggtgcaagaattacaatctcaagagaggagtttgaatccttagttcataaggttgaggagtctgataaattagcagatatcaaagtggctgctgccacagcacaggttgaagctgcaaaggccagcgaaaatgaagttctaaagaggttagaggaaactcaaaaggaaattgaggatatgaagagtgaaacacaggcagcgttgaaaagggctgaaatggctgaagcagcaaagagggctgtggagggtgagctcagaaagtggcgcgaacgagagcagaagaaagcagcagaagctgcatctcaaatattggctgagacactgatatccccagaactatctcctcagcactataggattcaaattcagaattcacctccaaacagggtggagatgaagaagttagaaaaggggaaggtgtcagtttcaaagaaagttctcttgcataatatcagtggcatctttcacaggaaaaggaaccatgttgagggagaatcttcttcttagcttccctgggagaatcatgtatgaaagatctcttgcttaattacagttttgtccagctcatgaatgtgagagatacatactggtttgtgtgaaagttgaaactactgcgatcagatttttgtcatcatagcatgagggacaagaattttgaaatgtcaatagtttggtcacaagtattttattaatgaaactttagtatattattgtatattgctacttaacatgctagtatgatgaaatattttgtggcaatcactataatgataataataactattaaaaaaactatatcttaatcaaaacaatt

SEQ ID NO: 149 - DNA, 2232 bp, Glycine max
ttcagttgctttaaggcagggaaaagtggcatcctcagagagagaaagaaagagagtgagagggtcatcaaatatattaaaataaaaaaaataaaaactatttttttttctataacaacaatgccactctgctacctagagtcaattcctggtttgctttcaagggtttgttctatttatgcactgaaatggtgatgggaagtaacagcagaggaaaggatggtgaaggcacttcaggagttaaaaaggatgagtacgaacaagacatcaaatttctgccacctgaagcgctttatggcaataccaatggattcacagatcctttggttcagttaactccacctggacctggaccatatgagccaccacctcccttgctcatacaaccccaggtccctgtggctgccatgcaaagaccagcagcgatagcgcaacccctgccacaaaatggatatgtagaatctgttattcatgaaaggttgaaaaatgtgaggatcacatggaatcatgcagccacgaatgttgctattgcaggatcatgggacaactgggagaccacggagcccttgctgagagtagatcaaaattttgtcattgttaaaacactccctataggtatctatcattaccgtttcattgtagatggctacttgacacatgctccagagttcccatcggcttctgatgattcaggttatggctacaatatattggatttgcaggattatatcccagaaatagttgcaagcttatccgattttgaagatcctccatcaccgccatcaagttatgataacacaaacttaaatgaagaggagttcagcaaacccccaccagaattaccacaacaactaccagtggcaataagaaatgaggcttcatccgcaagtggtagtcatcatgtccctaggcccacgcatttggaactgaatcatctatacatccacaaaactgatagggatcaatttgtggcactacgatcaacttataagtttcaacacaaatatattactgcggaactgtacaagaccctgcgcagggaaagatgatgaagcattgtgttttttgtctgctattgtacttgcctcgtttaagcggcctttattagaacatttgttaaggtcattaatcaaatgtgtagaaaatcgattatagtaggtaaatgaaaatttgatttccatgtaaaattggtctttatgggaatattattttattctggcagtcaatatatacaatacatattcatagactcatagtagctatcctgctttcaaggtcatatgttttggaattgaaaatgctttactgcacatgctgtgatgaagattcaatggttactctagcatatagtggctgacagtaatgtactatgactttctttccctgttctctgttgtgatctcagataatgtcatcagcttccgaaatcgacccattgccaaatggcaaatgccctgattctatcatggtaattcgatggttgaacagaagaactaatagccatttaaatgctttaaaataaggggcagatatatagaagtgaaatggcaattgctccccaggcaatagctaaacttgatacctaaatgtacattacaatgattacataatatgcatagtgctagtgtaatctgtgtatacaccttcgtcatgtggcaagtatcttcttgtttccaccactttctacttttgataactgagactaacctttcattcatattggttaaaatttcccagaccatgctacatttctttagttttactcgcacaaatttccgtataaaaacgacagaatgatcagtgttgacaatcatatttaattattaggcataactgttcattatacatcattacgtctgaatattgctaataagatagagatgccaaccatagtttctgctaaataaaaaacaacagtagttctatagtataccaacgatctaaacctcttcccattttctttttcctgttttataagcaaggagcagaaagaaagaaaaacttaaggtgtaaaaaattccattgttaattttccatggaacagtcggattaccaaccatctcatattagcaggcaggtccggtgttcggatcaccaacgtgctattcttgaaacaagaaacctcatttatgctttcctcaatccgacattcataagtgaactttgttcattaaaacgagccataacatatgtgaaaaagtaaagaatttctctggtgaagtttgagaatga

SEQ ID NO: 150 - DNA, 1781 bp, Glycine max
ctactgcaaagcgaatactcattccttccttcaaatcccccttcttctctcttccttcaaccatcgttcgttctgattgaactttgctagggtttcaacctctctcactctcagtatgtacaatgtacggattcattcttacatttgatttgaacggttcattcgttgtgggtcgtcttcaaaatgtgttttttctcaagatttgtgtaacattgcaaattctcccgtggaccttgtggattcgagtaatgttgctcaagtatcatcatcctattgcagaagtcctttggaaggtggacatattaagttgttgtttggatttgaagtttaattttttaaatcaggaattccttgcaccataaagaaacttccagtatccctgtatttctcttttcaaattgttgtcagatgtcagaaattgacttggcagttattaaacctgagatgatgaagctgtatgtctggcttcagacttcagatgattcaatccaacaagtggaacaagaaattgcaatgttttgcccactgatatgtcaagaaataatacaaaaaggcatgggatcttccaagagttgtgcaatatgtcttcctcaacaagtcagtcctgccatgttgagcttaattcttgactattgtcggtttcatcaagtaccaggccgttcaaacaaggaacgtaaatcttatgatgagaaatttgttaggatagacacagagaggctttgtgagttgacatctgctgcagacagccttcagttaaaacctttggtggatcttaccagtcgtgcacttgctcgaataattgaagggaaaacaccggaggagatacgtgatatatttcatttgcctgatgatcttacagaggaagaaaagttggagcccttgagaaatataacggctgacccaaggatcaggcttttgaaccgtttgtatgccaaaaagagaaaagaactaaaagagcgtgaaaggttaaagaatgttgaagttgaggaagagcatgttgatgaacgttcagttgatgaccttttgtcttttattaatggaaatgatggagatccaaagggagttaaaacatcaaagaataaaaagaagaaccggaggaaaaaagagcaacagaagagctcttctttgaaggaggaatctgaactgaacaaaaaggaggtaaatggtcatgatatcagacaccaaagttctgaagctgagagaattagcgagaccttgtatttaccctatgcagatgatgacacattttctcctaaggttgagtttgatgatggtgatatagatgatgagatcgatcctgctttaaaggaaaaaattgacagggaagtggaagattttgcccgcagattaaattctgactggccagaaagaatgcaagaacttttatcttcagggcaagaacgggagacaatactttttactacagatggttttctaaggcgacatgcttgactggacttagaatggaattatggaaatgaatccttatcagaggcttcaacaattttgagatgctggcgggagcaagaaaagttttgcatgccagttgtttttctttttttgcatttccattgttatattctattctttgcagttcatttttggtgcccaattttattccggggactcttgtactttaaggtcataaaaaaaaaaagctcctagtttgtatggaatattaatcctttatttttgtgcctttgcaattttggttttttatttgtatggaatacattgattttttttaagacatttggtgtgggggtaaggattaatcttca

SEQ ID NO: 151 - DNA, 579 bp, Glycine max
atgaagttcaaaatttgtacaacttcttttcaaaccattctctttcttctaattcttgtagccagtttctggctaataagcattgcaggtgctaactgcaggccaagtggaaggctaaggggaaaaaagcctccttcaggaaaatgcaacagagagaatgagtctgagtgttgcaaaaagggaaaagtttaccacacattcaagtgttccccacctatctctcatcacacaaaagcaattctaacactaaatagctttgagaaaggtggagatggaggtggcccttcagagtgtgacaacaagttttactcagacaacactccagtagtggcattatcaactggatggttcaatgacaaaaagaggtgtcatcacaatatcacaatctttggaaagggaagaagggtccatgccatggtggttgatgagtgtgattccaaaagagggtgtgatgctgagcatgattttctgcctccatgccccaacaatgttgttgatgcctctaaggctgtttggaaggctttgggtgtgccaaaacgtgactggggtgaatcagacatacactggtccgatgcatga

SEQ ID NO: 152 - DNA, 543 bp, Glycine max
atgtctagaaccgtggagatcacagttttgtcggcagagaacctccaaatgaacaaaaaacccattagagggaacgcatttgtgacggttcaatccgacgctagcaacgacacaagtgccacaacagtggattctgaaggagggagttacccttcctggaacgagaagcttgtgatggacgtgccattgcatgcaaggtttataaccgttgaagtgaagtgcaagacatcatcggcggggtcgaacagtatcggagtggcgagaataccggtttccgatttcgtcggagggtacgtgccggaaaatcaattgcatttcttgagctacaggttgtgggacggtaaagttaggagaaacggggttgtaaatatttcggtgagagtgaaagtggcacaacaacaacaacaacaacaacaacattcgtgtaattcgaattctatgtcgttgtcgtcggcggtaacgggtgtgccggtcgccggtaatggatccaccggagttgtgacggggattccagctatttggttaaactaccaaagaaattaa

SEQ ID NO: 153 - DNA, 832 bp, Glycine max
cattcaacattgaaatctccaacattcccacatctctcgtatacccttttgtctttcttcactaaggtatcttattgagagttcaagactagtcctttgatacgttgaatttctttcaagtattgagattcatttaaaaaatcaattttttgatatcttatacatacatctattgggatgtctagaaccgtggagatcacagttttgtcggcagagaacctccaaatgaacaaaaaacccattagagggaacgcatttgtgacggttcaatccgacgctagcaacgacacaagtgccacaacagtggattctgaaggagggagttacccttcctggaacgagaagcttgtgatggacgtgccattgcatgcaaggtttataaccgttgaagtgaagtgcaagacatcatcggcggggtcgaacagtatcggagtggcgagaataccggtttccgatttcgtcggagggtacgtgccggaaaatcaattgcatttcttgagctacaggttgtgggacggtaaagttaggagaaacggggttgtaaatatttcggtgagagtgaaagtggcacaacaacaacaacaacaacaacaacattcgtgtaattcgaattctatgtcgttgtcgtcggcggtaacgggtgtgccggtcgccggtaatggatccaccggagttgtgacggggattccagctatttggttaaactaccaaagaaattaatctttgaagggtaaaaagaaaattggcaaattgttgattcaattactacttgtgagtttcccagtagtatatatatataaattgtgaatataagaaaagaaatttacgagta

SEQ ID NO: 154 - DNA, 1561 bp, Glycine max
ctgtgctttgctttcttttctctcttagctaaaacagataggtcatatctcaattatgtaacattagcatacccttttttctttctttctttcttcaatttctctgcagtgtgcagtgtgtgtatgctctttctcttttgaggttcttcttgctttctttggattcttggttcttattttttctgtttccttttcttttataggctcgagcctttattattcctagctcccttccttggctctaaagataaattttcccttgattttgccaatttggtggatatctgcttcgttttgtcaactaaacttttttcctttgcttactgagagaacactgcttgtaattgaagttgcttttctggctgctttctgtgtcttcaagtcttacttggaagactcagatttgctgcaaatctctcaatttcctcatcatcacaaggtttaatttcttggttttgctctatagctacttgcagcagaaagaactcaaagaagagatcatcatggtgaggggaaagactcagataaagcgtatagagaacgccacaagcaggcaagtaactttctcaaagcggcgaaatgggttgctgaagaaggcctttgagctatcagttctgtgtgatgctgaggttgctcttatcatcttctcttcaagtgggaagctctatgaatttgctagctccagcatacagtgttcaattgaacgataccgcaggcataccaagcatgataatccaactacattcagatcagttgaacaaaatatgcagcatttgaagcaagaggcagcaaacatgatgaagaagattggccttcttgaagctgcaaaacggaagttcttgggggaagggttgggggcttgctccattgaggaactgcaatggatagaacaacagttggagaggagtttaagtaatgttagaacaagaaagatccaggttttcaaggaacaaatcgagcaactaaaaggaaagcatggaatcaatctacaaacagaaacaaagaatcagaatgtgaatcaaccccaatacaatgcaggtagtccaagttcagatgtggagaccgaattgatcattggacttccggatacaagaacaaggcgcatcgttcatcaggtctagtagaagattatttattccctggctatggaaaataaaataagggtaaaaataatgatagaataattccaaatcctcttacaatatcttcctgataatccttctaattattaataaaatgaagaaggtattaatttttttctctgtttccaaagtgttaaaatgtttttacaatttcctttaatactttctttatgaagtattaagaagagtattgggaggatgcatgttataggaggatatattattataaatggtagtggtaattatgggaatgatttgttttgcttgataatatcctcaaaacctatggtctaatgacccgttgtattgatacttatactttagactcagcagttgtatagttgccctcctggggtttaataaatgcatgactttccttgagtcttgaactttcttagttatggtaagtgactagtaaa

SEQ ID NO: 155 - DNA, 1410 bp, Glycine max
ccttaactgattggcagattactattattaagtattaagaaattgtatctgtttgattcttaaatataacggataggatattttaataattgtatatagaattgtctaaaaccttctcagttccctcttcacaaaccctcggatcacagtgttagggttcttcaattttctccgattgccatcaaacatcacacaccacccaccaactatacgtcagcattgaaccctaaaatacatgactcagaagcagagaaccagaatcccagattccatggaaacccagtacgaggagagtgagaaagacgagtcttcctcttcttatagttcctcagaagacgaggaggaagagatagagaaggagctggctgatgtaacgtttgaggagttgcagaaagcacgctcgaatggggcacatgcatttttccagaaacccaaagaagacataaaattaaaaagggctaacaagaataggccaatggaagctagtagcaagaagccagttactgggtttagagaggtcatccaagctccaaagaaggttgtacgtgatccacgatttgaatctctttgtggtaaacttgaccctgatggaaactgtcagataatgctgaaggattcttgttctgatctgtatcatagtgcgtaccaagaagtatcaaggtttaggaagagatataatttcttatacgaaaatgatcttcctgctgaaagacaggctcttaagaaggaattgaaaaaatataaagacccgaagcgtgtaaatgaaatagaagaacgtatatcatggattgataaacaagtgaagtctgattcagcgaagcatattgatgcagaaatattggctaagcacaaaaagaaagagagagaagcagcaaagcagggaaaacgtcctttttatctcaagaaatctgaaatacggaagcaaaggcttattgaaaaatataaccatctcaagtcatctggcaaactggaagcatttgttgagaaaaggaggaggaggaatgctgcaaaggaccatagatacatgccatatcgtagatctggtgatgtggaataggttttgtagctttaagattcttttgtaggctaaaattatactggaatatagcaccaaaaagaaaagtagtgtatttattcggtctgccatctttggggattaaatatgaactcttgttgatgactatcatggtatttgttctgtgactggtatttatctattcttgaagatttactaattggggaatggagaggcgcctctaggctataaggcaatcttttgattctctgctatgttcttgtgggagaacttcctttcgccattatcgttaggtcccttgttttagaacccatgtgtaatctgttcaagctttttcttagaaaaaaaattcattgataaacaatcagaatctg

SEQ ID NO: 156 - DNA, 1053 bp, Glycine max
atgagtttccttcgttcttttgcaagaaacaaggatatatcaaaagtaggacgcagaggtatccattgcatgcagaaactatgtgcagaaaaaatatctcctgattcactagagaaggcccaaaatcgtgtgatagatgctgcactcacacttgttcgagaaaatacaaggcttaagaaagaacttgtgcatagtttgggaggtgctgtagcaacttcaactcttcttggagttcctttgggtcataattcatcgtttcttgaagggcctgcatttgcacctcctttcattagggaaggtatttggtgtggtagcgcaaactccacaactgaagaaggaaaggatttaaaggacttgcgaataatggttgatgttggtgatatccctattcaagaaatgcgagattgtgggataggagatgagagactcatgaaagttgttagtgattctgtcaaactagtgatggaagaggatccattacgtcccttaattttggctggtgatcactcaatctcatatccagttgtcagagccatatctgagaagcttgggggaccagttgatgttcttcattttgatgcacatcctgatctctatgatgaatttgaaggaaattattattcgcacgcttcttcttttgctcgaatcatggagggtggttatgctcgtcgactcttgcaggtcggtataagatcaataaacaaagaagggcgtgaacaagccaaaaagttcggggtagagcagtttgaaatgcgacatttttcgaaagatcgtccatttttggaaaacctgaatctaggagaaggtgctaaaggagtatacatttcaatcgatgtggattgtcttgatccagggtatgctgtaggagtgtcccactatgaatcaggaggtctttctttcagggatgttatgaacatgctgcaaaatctcaaaggtgacattgttggtggagacgtggttgaatacaacccacaacgtgacactcctgatcgtatgactgccatggtagctgctaagtttgtgagagaactcgctgcaaagatgtcaaaatga

SEQ ID NO: 157 - DNA, 1857 bp, Glycine max
actcacgaccggtaccacaaaacatgggttaacttctacccctgttcattgctcctctttcgttcttctctctttctctttcaacgcattccaaccctgtggcgctataccctcctagatctactctctaaccgactttcatgatctatgctcaatgtctcggatgtgttggatttggattgaagtagccgttgataatgcaattcatgcgtgtagttttagccattgcatcaattatccaactgggcttcacaggctgggactaagagcagtggttagtcatacatggcactcttggcttcgcgagcaatgtcgaagggtgtggtggtatcagtgcctgttcttgttctatctgctttagtggccactgttttcctgttcttccttttgtcctctctttcatcctgctcctgccctactccttcagaaatatctgcctccaatgctaggagtgttggtgttggcattggtgtttctgagtctagcagcagtaatgttccggtagcaacaacgaaggagtctagcagcggttatattccgttatcaacgaggaaggaggatgttgagtgggtgaaggatcaaatccgagcaaatgggcttcaaatgcatgacaatgtgcttcgcaagggtattaatccccgcactcgggctcagcaacttgaggattttagacgatttaagggcatatctcactatgagggacctgattcagataatcacacatccttgccatgccctggggaactactagttgaagagcaccatagcaactatggtgaaccttgggccgggggaagagatgtgtttgagtttcttgccgaagccagtcaacttagaccagactcacaggtgctagagataggctgtggcactcttcgagttggtttgcatttcattcgatacttgaatcctgaacacttccattgtcttgaaagagatgagctctctttgatggccgtatttaggtatgagcttcctgcccaaggcctcttatacaaacggccttcgattgttaagggggatgacatggatttcagcaggtttgattctggcataatgtatgatttgatttatgctagtgctgtatttcttcacatgcctgataaactcgtgtggactggattggaaagattagcatctaaattgaaaccttatgatggacgaatctttgtatcacataatataaagttctgttcaaggttgggaggagaggaatgcacaaagaggcttgcaagtttggggcttgagtatcttgggaagcatactcatgatagcttgctattcaatcactatgagatatggtttgaatttagacggtcaaaggcataatatctggattggttccataaagaggcatcataaacatctctaaatgtcctcatggaactaaatgtgctttgctcatcacaagaaatctgcagcaattcaatcatatccttgctttgagtcctaagaggtcgcatttttctactcagtggttcatctcgtgccagaaatctgaatacacttttgactcttataaagagaaaagaaccatatgtaattttgattgaggactctacaaaggctgggagatttgtattattttttggggtctttatgtaaaagggctagcttaaagtttacattttcacactgcttctatatagattctgatatgatagttgtatttagcagtcttactatcttgcaaccgattgctgttttgaccattattacactagatgctatctaacatgtgcaatcatgtaacaatgtcttacagtgttgtttagatgttgtaacaaaagtattttgcagaatgttccaaaacatcctctccattaattgaaatatatcaaataagtatttttttgt

SEQ ID NO: 158 - DNA, 900 bp, Glycine max
atgtctggaaaatacacaacagtgaaagctgctgttgatgctgctccaagtagtagtggaaggtatgtgatatatgtgaagggtggggtgtacaatgagcaagttgaggtgaaagcaaataatataatgttggttggagatggtattggaaagaccataatcacaggtagcaaaagcgttggaggaggcaccacaaccttccgttcagccactgttgctgctgtgggtgatggattcattgctcaagacatcacattcaggaacacagcaggagcagcaaatcaccaagcagtggcattccgttctggctcagatctctcagtattttacagatgcagctttgagggtttccaagacacactatatgttcattcagagaggcaattctacagagaatgtgacatttatggcacagtggatttcatctttggcaatgctgctgcagtcttgcaaaactgcaacatctatgcaagaacccctccacagagaaccatcacagtcacagctcaaggcagaactgaccctaaccaaaacacaggaatcatcatccacaactccaaggtcacaggtgcctcaggcttcaaccctagttctgttaagtcatacctaggaagaccctggcaaaagtactcaagaacagtgttcatgaaaacctatcttgatagcttgatcaaccctgctggttggatggaatgggatggtaactttgccctagacactttgtactatgctgaatatgcaaacactggtccaggttccaacactgccaatagggttacttggaagggctaccatgttctcactagtgcttctgaggcctcacctttcactgttggcaacttcattgctggtagcaattggatacctagctctggggtccctttcacctcaggactttga

SEQ ID NO: 159 - DNA, 1386 bp, Glycine max
aagcacaaatctcaaaccctcctagtctcccctatctaccctgagaattccttaaaacatggctggatgttctcaacaaaggctgattgttatgtttttatgtctcattgggatagtttcagctacagatttaacttcttcagctgtgagtttagctgattatgagttaagcaccactttttatcttttaaagtgtcccctgggcctctttaccattaataacctagtaaccgctgctgtgcggaaagagtctcgcatgggtgcatccttgctccgtcttcatttccatgattgctttgtccaaggatgtgatgcatcggttttgttaaagaacactgcaactttcacgggcgaacaaggtgccttccccaacgctaattctctaaggggtttcgaagtcatagacaacataaaagcaaaattagagattttgtgccctggggttttctcttgcgctgacatcttagccgttgctgcaagggattctgttgttgctcttggtggacttgggtggcaagttcgcttggggagaagggactcaaccactgcaagtttaagtggagctaactcagatttaccagctccctttctgggtcttactgaccttgttgctgctttccaaaagaagggtttcacagtaaatgaaatggttgctttatcaggtgctcacacaataggcagcgccaggtgtttaaccttccgatcaagggcttacaacgatagcgatatagaaccctcgtatgcaaatttcttgagaagcaactgtcccaagagtggtggtgatgacaacttgtctcctatagatatcgccactaaagacatttttgacaatgcttactaccggaatttactttacaaaaagggtcttttccactctgaccaacagctctatagtggcagtttcacggactccaaagttaaatattatgccacctacccatcacttttcttcaaatcagatttcgctaacgccatgctcaagatgagcaaccttagcccacttacagggacacagggtcagatcagaaaagtatgcagcagagtgaattaattgagttcattggtaaattatggtatatttcttgcatgagattcatgaatatccgaatacataaacccattcatttgtttgccattatattttgttaatttgttaaagtttcaattatgtgtcaatgtttgacaccctgtgtttgcatttgtttggaaactcaccgtccttaattgtgtattgtttcaggaagtatttttgtatgatgtatgtcctttacataatttgattttatttttccattttcattgtattgatttgaaaattatggcatatttttatgtattgtaattttttttaatatcaaaatccaagcactaaagcctggaaccaac

SEQ ID NO: 160 - DNA, 1266 bp, Glycine max
aacgagtggtgtcatattgtgcccctttcacaaacgcgttggcataatgcaaacgacctgtgactgaccaacgaaacggcacaaaaacgccaccgtcggtggtgcgtcaaaaccttcaccactaagcatcaaacttttaaatacactcttcccttcaaaatctcctcatattatctctctctctctaaaaccacaaattacaaaatcccctcatattatctctctctctcttaaaccatcatgtcctccaccgcgcctcccgtcctccccatctccaactcccaaaccaccgcgggaaccaccggtgcaggcggcggcgccatcgaggctccggccaacaacccggccttccgcgctttcatcaacaacctctccaactccctccgccacggcctcgaccagcgccgcccctggtcggagctcgcggaccgctcagcgttctcgaaacccgagtccttctccgaagccaccctccgtgtccgcaaaaacttctcctacttccgcgtcaactactacgctgtcgtttcactcatcctcgcagtctctctcctaaccaatcctttctctctcatcctcctcgttggcctcctcgcctcttggaccttcctctacctcttccgtccctcggatcaacctctcgtcattctcggccgaacattctccgacttcgaaaccctagccctcctctccgccttcaccgtcttcgtcgttttcctcaccagcgtcggatctgtcctcgtttcggctctgatgctcggtgtcgccgtcgtttgcctccacggcgcgttccgcgtgccggaggatctgttcctcgacgatcaggagaattctcagcctaccggattcctctccttcctccgcggccctgcctccgccgctgccgccgccgccgccgctgttcccaccgttgcctcacgcgtttagatctggacaaactcagatctcgttgcgggtcctctagttgccttcactccgatctcgaaggtgtcgaagtcgtcgcgcatctcaacctcaacctcaaatggtgtaactttcaatagttgtaacggctgtaataacacctagaatgttcaaaataatgtcttttcagactatttttattagtggtcataacgactaaagccatgaatgaatttttgcatactatagtgacgacatcatgatataggcttcaaaaacccacaatggtcaaaataatgagagctttaatgatattaccaaaatatagactttaaaatcccataacattatcatatttatttttgg

SEQ ID NO: 161 - DNA, 1860 bp, Glycine max
tcatcgattatccacctttgcaagttgcttcatccactgtacaacaccatacaattaatgcgctgctctgtgtatatatacacacaacactcacttttgttcgattctcaatttgagaagtaaatccaaactcaataaaatggcttcaaattccagcaccaacaacgctggctaccccatcaaaaccatcgtcgttttggttcaagaaaaccgttcctttgaccacatgctcggttggatgaagtccctcgatccgaaaatcaacggtatcaccggttcagagtctaacccgatttccacatccaatcccaactcgaatctggttcaattctcggaccagtcggtctatgttgacccggacccaggtcactcgatccaagacatttacgagcaaatcttcggagagccttggagcgaagcctcaacggcaaagaaattgccaccgaccatgcaaggctttgcccaaaatgccgggaggcaagcagtgccaaagaatgcgacggcgacgatgatggagacggtaatgaatgggttcaaaccggatttaattccggtttataaagagttagttaaggaatatgcggtttgtgactgttggttcgcttcggttcccgcttcgacccaaccgaaccggctctatgtgcattctgccacgtcacatgggttgacaagtaatgacaccaataagcttattgggggtttgcctcaaaagacgatatttgattctttggatgaaaatgggttcagttttgggatctattatcagtctccacccgccacccttttctataggaatcttaggaaactgaaatacgtagataacttccgtccattcgatttgttcaaaaagcattgcaaagaagggaaattaccaaactacgtggtgattgagcaaagattttttgacttgttatcaataccagggaacgatgatcacccatctcatgatgtttcggagggtcaaaagtttgtgaaagaagtgtatgaggcactaagaggtagcccacaatggaatgaaacattgtttgtgattgtatacgatgagcatggagggttttatgatcacgtgccaacccctgtggaaggagtgcctagtccagatgatattgtgggccctgaaccattcaagtttcagtttgatagacttggtgtgaggattccagccatcattgtttctccatggattgagccaggcacagtgttacacggaccttcgggaccatccccaacatcacaatacgagcattcttctataccagcaactgtgaagaaaatattcaatttacctgaatttctaacaaaaagagatgcatgggctggaacatttgaaggtcttttaactagaagcagcccaagaactgattgtccagtgaaattgcctgaacctgtaaaactacgagaagctcctgctcaagaaaaggccaagttgagtgaatttcaagaagaattggtacaaatggcagcaactctgaatggggatcatagaaagagtatataccccgacaagttaactgagaacatgagtgttccggacgcagttaaatatgttgaagatgcattcaatacattcttgaatgagtgtgagaaggcaaagcaaaatggtgctgatgagtctgaaattgtcgattgtgctgatggatgtagtagtgcaccacccgattccaaaaatttcttttacaatgtgctgtcttgtataacatgtaatcgataattaatcaagcttgcacacattttacattatatataaatcctgccagaaacacgtacgtgctggcatgtactggctattcatggaatctatgttgaataaaaaaaacatgtatttattttgtaatatatatcagccatctaattaatttc

SEQ ID NO: 162 - DNA, 1854 bp, Glycine max
atggcttcaaggcctggaatcctaacggattggccatggaaacctcttggaagctttaagtatttgttactagcaccttgggtagttcacagctcctattctgtgttggtgaaggataagagtgaaagggatataagcacctttctcatatttccatttcttctatggcgtatgcttcataaccagatatggatcactctctctcgttaccgaaccgccaaaggcaatgctagaattgtcgacaagggaattgagtttgatcaagttgatagagaaagagattgggatgaccaaatattgttcaatggattattatactacttggcaagctacacattatctggggcatcccgtattccattatggagaacagatggagttgttatggcaatattgcttcatgcaggaccagtggagtttctctattattggttacacagagcacttcatcatcattttctctactctcgttaccactctcatcaccattcttcaatagtaacagaacctataacttctgttattcatccattcgctgaacacatattatattttcttctctttgcaatacccaagttaaccctcgtcttcacaaaaacagcttctgtgggggccatgcttggatatgtcacttacattgatttcatgaacaacatgggtcattgtaactttgaggtggttccaaagtggctctttgacatctttcctcctctcaaatatctcatgtacacctcatcgttccattctttgcaccatactcagtttagaacaaactactccttgtttatgcctctttatgactacatctatggcaccacagacaaagcttccgataaattacacgagtcagcattaaaacaagaggaagaaatccctaatgttgtacacctaacacatctcacgacccctgaatccatatatcatctcaggcttggatttgcttacttggcttctaagccttacacgtcaaaatggtacctttgtttgatgtggccagtaacagcttggtccatgatcctcacatgggtttatggccgtacatttattgtggaggggaatcgttttgacaaactgaagttgcaacttgggcaatacccaagtacatacttcatgcaatcacaaaaagtggctatcaacacaatgatagaggaagcaatactcgatgctgacagaaagggcataaaagttttgagcttaggcctaaggaatcaaggagaggaccttaacatctatggaggactatatgttagtaggcatccaaagctaaaagttagggttgtagatggaagcagtcttgtagttgctgttgttcttaatagcattcccaagggaacaactcaagttttacttaggggcaaactcaccaagattgcttatgctcttgcctacacattgtgtcaacaaggtgttcaggttgctgcattgtatgaggatgattatgtgaggctcaaaaagtcgttcaatagctctgaaaccaatttggcctttaccaaaagcagcacacagacgacttggttagtaggagatggattaactgaagaggaacaactgaaggcacccaaaggaacattatttattccatacacacaatttccaccaagaaaatatcgtaaggattgcttctaccattgcacccctgcaatgttagctccttgtagtgttgaaaatatccattcttgtgaggattggttgccaaggaggataatgagtgcatggcgcatagctgggatagtgcactctctagaaggatggactgaacatgagtgtggccacacaatgcataacatagacaatgtttggcattcaactcttcaacatggattccaacctcttccggtgccaattaatgagtaa

SEQ ID NO: 163 - DNA, 1970 bp, Glycine max
aatctttggtgctccttcggtctcttatcctaattaagttagtgcaaagattatggcttccaaacctggcatactaaccaattggccctggaagcctctcgggagtttcaagtgggtgattttgacaccatggattgcacacagcacttactctttcctagtgagtgagccaaaggagagggaccttacttatttcctcatctttcctcttatgatggtgaggatgctgcatgaccaagtttggatcacactttctcgccatcgaactgccaaaggcaaaaacagaattgttgacaagggcattgagtttgaacaagttgatcgagaaagcaattgggatgaccagatcttgttcaatgggatcatattttatataggctatatgttagttccagagagttctcacatgcccttgtggagaacagatggtgtacttattactgctcttttacacgctggaccagtggagtttctttattactggttacatagggcacttcatcaccacttcctctactctcgctatcattctcaccatcattcttccattgtcacagaacccattacttctgtgatccatccatttgctgagcacatagcctactttgtgttatttgccattccattgtacacaactgtggttacaagaacagcttctatagcatcatatgctggttatctcgcatatattgacttcatgaacaatttgggccactgcaatttcgagtgcattccaaaggccatcttctcagcatttcccttcctaaaatatctcatgtacacaccatcgtttcattcactgcatcatacccaatttcggacaaattactcactcttcatgcctatttatgattacatttatggtaccatggacaagagtacagacacaacatatgagatagcattaaagagagaagaaagtttagcagatgtggtacatctaacacaccttacaaccccagagtccatctatcatttaaggttgggatttgcttccttagcctctagacctcaatcttctacatggtacctctacttgatgtggccttttacactttggtctgttctcgtgacttggttttacggtcaaacatttgttatggagaggaatgctttcaaaatgctcaatttgcaatcatgggttataccaagattccatgtacaatatcttttcaaatggcaaagtgagacattgaacaaacttatagaagaagcaatacttcaggctgagttaagcaaagtaaaggttttaagtctaggtctttcaaatcaggttacaactatgtataaggatgaatatgacaaacttcaattaaggatccccaatgaatccaaagacaacttagttttcccaggatcctatcctgcaaagatatggctattaggagatcaatgtaatgaggttgatcaaagaaaggcaccaaaaggatcattgttcatacctatttcccaattccctccaaagaaacttcgcaaagactgcttctaccacagcacaccagccatgatagctcccccttctttagtgaatgtagactcttgtgagaactggctgccaagaagagtgatgagtgcatggcgtgtcgctggaatattgcatgccttagaaggttggaacgtcaatgagtgcggaaatgtcatgtttagcgttgagaaaataaggcaagcaagtcttcaacatgggtttaggccattaaagattaataatctcatttctgcttcagttctaaattaattaccatgatataaatctaaatcaatgtgtgtctataaatgtatcaacaaattaatcaagtagctagctagcttgtgatatttccaattacaatatcaaatttgatcaaactagctatatgaattctcgcagcatatatgttgtttactagaaagtgtgtttaaataatgcataagtgatccttttgaaaaatgcatatttcttagttcctaatgggaatgggggaggggggatt

SEQ ID NO: 164 - DNA, 3040 bp, Glycine max
gagaacattcctattgaggaggtttttgataatctcaaatgcacaaaagaaggtttaagctccgagcaagtacaacagaggcttgacttgtttggatacaataagcttgaagaaaaaaaggaaagtaagatactgaagtttttgggctttatgtggaatcctctgtcatgggttatggaagctgctgctatcatggccataggcatggcacatggagggggtgaaggtggagattatcaagattttgctggcatagttcttttgctacttataaactccaccatcagtttcatagaagaaaacaatgctggcaatgcagctgctgcccttatggccagattagcccccaaagcaaaggtacttcgtgatggaaaatggagtgaagaagatgcttcagtgttggttcccggagacataattagcatcaagcttggtgacatcattcctgctgatgcacgtctccttgaaggcgatcctttgaagattgatcagtctgctcttactggagagtcacttcctgtctcaaaacatcctggagaaggagtatattctggttcaacttgcaagcaaggagaaattgaggcagtagttattgcaactggagttcacaccttttttgggaaggcagctcatcttgtggaaaacacaacacatgttggacatttccaaaaggttctaacatctattgggaatttctgcatctgttcaattgctgttggtatgattttggaaatcattgtgatatatggaatccataaaaagaaataccgaaatggtattgataacctccttgtgctattgattggtggcatccctattgcaatgccaactgtcctttctgttactatggctattggttcacacaagttggctcagcagggtgccataacaaagagaatgactgccattgaagaaatggctggaatggacgtgttatgtagtgacaaaacaggcacattaactcttaacaagctttcagtggacaagaatatcattgaggtttttgctaaaggggttgatagtgatatggttgtacttatggctgcaagagcatcaaggctagagaaccaagacgcaattgattgtgctatagtttcgatgttagcagacccaaaggaggcacgaactggaataaaagaagttcatttccttccattcaatccaactgataaaagaactgcacttacataccttgatgctgccggtaaaatgcacagagttagcaaaggtgcaccagagcagattctcaatcttgcacataacaaaccagaaatccaacagagggttcatgcaattattgacaagtttgcagaacgtggacttcgttctcttgcagtcgcccgtcaggaagtacctgagggaactaaagacagtccaggaggaccatgggagtttgttggcctgctccctcttttcgatcctcctcgccatgatagtgcagaaacaattagaagagctcttgatcttggcgtgagtgtaaaaatgatcactggtgatcaacttgcaataggtaaggaaacaggaaggcgtctagggatgggaactaacatgtatccttcttcatcactgcttggtgaaaataaagatggattgggtgctgtcgccgttgatgatctcattgagaatgctgatggttttgctggagtctttcctgagcacaagtatgagattgtgaagaggttacaagctagaaagcacatttgtgggatgactggtgatggggtgaatgatgcacctgccctgaagatagcagacataggtattgctgtagcagatgctacagatgcagccagaagtgcttctgacatagtcctaaccgaacccgggttgagtgtgatcataagtgcagttttaactagccgtgcgattttccagagaatgaaaaactacacaatatatgctatatctatcactattcgtattgtgcttggtttcatgttactgaacagcttttggaaattcgactttcctccctttatggttcttgtcattgccattctcaatgatggtaccatcatgacaatatctaaagacagggttaagccttctccacttcctgatagttggaagcttagtgaaatctttacaactgggattgttcttggcagctatctggctctaatgactgtgatcttcttctatatagttgttgaaacaaacttctttcctgaccattttggtgtgaaacactttcactacaatccagatgcttctatcaaagatccaaccaaaagaatgttgggatctgctgtctatcttcaagtcagtacaattagtcaagccttaattttcgtgacacgctcaaggggttggtcctacacagaaagacctggtcttttgcttgtcactgccttcatcattgctcaagcgattgcaactgttgtatctgccactctcagttggagacttgctggaatcaaaagtattggttggggctggacaggagtcatatggttatacaatattataacgtatctatttctagatcctttaaagtttgctgttcgttacgcactcagtggaagggcttggaatacagtgataaaccaaaggactgcattcaccaacaaaaatgactttggtaaagaagctcgtgaggctgcatgggcaaccgagcagagaaccttacatggcctccaatctgctgagtcaaaagggtttacagacaagcacaccttcagagaaattaatacattggcagaagaggctaggaggcgcgcagagatagcaaggctgagagagcttcacactctcaaaggtagagtggaatcatttgccaagctaaggggtctggacattgatgccatgaacggacactacactgtctaagactttatgactgctatctatcatcattatgatgccatgtgactctttaaatttcttgtattatggctttgtctgatgtcagactacaggttttacttcaacaatgtatctgcttagttttcttgtacttttcattcaaaccattggttgttgtttgctttccattttgtctttcttctttgggaaaattgtacctattgtgttacaataa

SEQ ID NO: 165 - DNA, 1676 bp, Glycine max
tttggtactctgacacaagtcatcattaactctatgcctattcactctttcctcaatttctctatccatctatctcttttatcactgtcctccatagtatctatctatctatctatattttcttttattactgttctgtaaaaaagctattttggccatctgaccaccaaagcctacaccattttgctcctctctctcttttctcatcctcacaattgggcaaaacacacacaacacaacaatgagtgagaaagatgatggcttgggtttggggttgagtttgaagttgggatggggagaaaatgatgatgataataataataatctaaatcatcatcaacaacaacaataccctttctacgtgcacaagcctcctcaatcggttccaaaccaaagggcttccttcaataacttgttccattttcatgatcggagctccgagacgcggtcgttcctccgcggaatagacgtgaatctgccacctccgcccccatcggcggtggtcgacgacgagaacgcggtgtcatcgccgaacagcacgatatcgagcatcagcgggaagcggagcgagagagagggcaacggagacgaaaacgagagaacatcgagttctcgcggcggcggaagcgacgacgatgatggcggagcttgcggcggagacggcgacggcgaagcgtcgaggaagaagctgaggttgtccaaggaacaggcattggtgctggaagaaacattcaaggaacacaacagtctgaacccgaagcaaaagcaagctttggcaaagcagttgaatttgatgcctaggcaggtggaggtgtggtttcaaaacagaagagcaaggaccaagttgaagcagactgaagtggattgtgaatacttgaagaactgctgtgagaatctaactgaagagaataggaggcttcaaaaggaagtgcaagagcttagggcattgaagttatccccacagctttacatgaacatgaaccctcccaccactctcacaatgtgcccttcgtgcgagcgtgttgccgtctcatccacatccttttcctcatcggccaccatgccctctgccccgcctccagctaatctcaacccggcaggccctaccatccagcggccggtgcccgtcaacccttgggcagcaatgttgaatcaacaccgtggccggccataattgatcgctcccggccttaggtagtagggtaaagttcaggatggcagctaggacattttagttttgtagacagaaatgaatcaatgaaataggaatcttatgggttggtttacttttactaggactttgagagctcatggtttgggaaattctatttgcacccctcttttttttgcaccttccattttcttttacaaattagtttttgccttttcggaatctacaatactattgtagaaattaatttttgaaatgtaaaagaaaaggcagagactgtgaagagaaaaaaaaagggggggctgggggggatgcaattagaatgatcctcatgcttttggttattaactcttttttgtcttggcctattttattttgagcatagatagaacatgttttagtcaactttaggatgtgtaaagtttggtgttttcatatgctgaacagtgtttgttatttgttaaccttggaaagatggaaaagggtattggaatctgtttttttt

SEQ ID NO: 166 - DNA, 2343 bp, Glycine max
ttaaaagtagaagaagagggaagaagcaaggacgatcagagaaattcaaacaacacaacaaaacctcgagaagtaaaccaatttcaaaatccacaccattctcattccccttctccttctgtactttccgttacgaacttgcctaaaagcaactaaatgcttcaacttcactaacgctatagtatcgtgtcaacaatgccaatgcatcaccatcttcttcttcttccccttctcttctctcttgtttctccgatgacctccctcaactccgacggcctctccctgttagctctcaaagcggctgtggacgccgaccccaccggagttcttacttcctggtcggaaaccgatgtcaccccatgtcattggccgggaatctcctgcaccggcgacaaagtaacccaactctccctcccaagaaaaaacctcaccggttacatcccttccgagttaggcttcttaacctccctcaaaagactaagccttccgtacaacaacttttcaaacgcgattccaccatctctattcaacgccaggtcactcatcgttctcgacctctctcataactctctctccggttccctccctaaccagcttcgctctctcaagttccttcgccatttggacttatccgataactccctcaacggctccctccctgaaacactctccgatctcacctccctcgccggaaccctcaatctttccttcaaccacttctccggcgggattccggcgactctaggaaaccttccggtcgccgtcagcctcgacctacgcaacaataatctcaccgggaaaatcccgcaaatggggacccttttgaaccagggtcccaccgcgttttctggtaaccctggactgtgcggtttcccattgcagagtgcttgccctgaagcgcaaaagcctgggattttcgctaaccctgaagatggtttccctcagaaccccaatgcgcttcacccggatggaaattatgagagagtgaagcagcacggtggtgggtccgttgctgttcttgttatctccgggctctccgtcgcggttggcgcggtttcgctgtcgttgtgggttttccggcgaagatgggggggtgaggaagggaaattggtgggtccaaaattggaggataacgtggatgcgggagaggggcaagagggtaaatttgttgtggtggatgaagggtttgagttagagttggaggatttgctgagggcttctgcgtatgttgttgggaagagcaggagtgggattgtgtataaggttgtcggtgtcggaaaagggttgtcctccgcggcggcgaatgtggtggctgttcgaaggctgagcgagggtgatgccacgtggcggttcaaggagtttgagtctgaggttgaggccattgccagggttcgtcaccccaatgtcgttcctttgagagcttattactttgcgcgtgatgagaagctgattatcactgatttcattcgcaatggaagcttgcacacagccttacatggtgggccttccaattcattgccaccattatcatgggcagtaaggttaaaaattgctcaagaagcggcaagaggcttgatgtatatacacgagttcagtggtcgcaaatatatccatggcaacataaagtcaactaaaatcttgctggatgatgagctccatccatacgtctcaggttttggacttactcggctgggtttgggcccgacaaagtctgccacaatggcaccaaaacgaaacagcttgaaccaatcttctataaccactgcaatgagttcaaaggttgcagcttccttgaaccactacttggcacccgaggtgcgcaatactggtggcaaattcactcagaaatgtgatgtatattcttttggtatagtgctgttagaacttttgacaggtagaatgccagattttggagcagaaaatgatcataaggtactagagagttttgtaaggaaagcattcaaggaggagaagccattatctgatatcatagatccagcacttatccctgaagtttatgctaaaaagcaagtcattgttgcattccatattgctctaaactgcactgaacttgatccagagttgcgacctagaatgaaaaccgtgtcagagaaccttgatcacatcaaaatacagtgagaaacaagagatgtcttagtgtagtggggttgattttgtaactcgcgggctagtagatgtatctctttcttccatttctcaatggaaattgtttcctttcacctttatttaaaatcaaggaacggcccaaattgattggtgtggtaaatattttccttctttttacatcctgtttacttcaaaatacaaatcctacggattcgc

SEQ ID NO: 167 - DNA, 1116 bp, Glycine max
atgtatcagtatagttcccaactatacggaactgaatgggagtcctacatggggattagcaacctagacaaggttgttggatcagaacaactgagttttgagcccacaaaatcacccttcaacattgtgacaactcctcttcaaattactccaccaggtttttgtgcaagtgcaatcaaaagccttgtgagttttcaagctcagcaacaacaacaacatgctcatcaccagcatcagattgaagttccagctgcttggtgctttgagtttccaaagacgacaacaacaacagatacgcacatggtgatgaacaatatttgccaagcctctggagataacttcaccacaaaacaagatcgaccatcgtctcaattcacaagctccttcttgtctagcagtggtgcagattgccgttcttcttctgaaaaatattgtaaaattgcttcttattccgaagaaaaacatagtagcattcagcctgatagtattcaatattacgacctctattcacaagaagatgataaattactgagggatgatgctgccacggatgaagggccccttgaaatttcctttcagagaaatcagttggactcgtgtacaaagcgagaaaagcaagctcctcatcgaacttgtggtgttgcctgtgtagcttctaggagaggcaaaagaagaataaaatggaccaaagatctgcatgagccatttatgatgattgtcaatagccttggtggtcccgaaaaggcaaagcctaaagctatactagatatgatgaaatcagatttgctgtccatttctcacgttaaaagccatttgcagaaatgtaggtctactatacacatgcacaaagctttgcaggaaagatctgagaaaggacagagaactaatggggtgtctgagcttcaagtcaaaatccatatgcaaattgaggaatcacggcaactacaactagagatccggagaaatatatgccaacaactaaagatgcaacgaaatttgcacactctaattcaagagcagagtcagcagctcaaagtaatgttagattaccaaaaggaaagaaccaaactggagaagaccccttacacagaactggaagctactgtccccaaatga

SEQ ID NO: 168 - DNA, 2759 bp, Glycine max
cgctttccaggtgagggtgtagtaccgttagaagcgagtccttctacggtccttgcctctgttcagtttcattcactcctcactgtaaaacctagcaagccaaaatcacaaccattccaagtgcatgtgaaatcgcaggtttaaggtttccgtttctccatgcaatgtatcgtgtgtgttccatttgtcgctttgactttcgttctcatttcctttgaccgttaatctcggcttttcttgcggaaagtaactgttggctgatcataaatggcgcccaatccaagagtggtggcggcctttacggcaatggcgaatctcgggattcatgaatcaaaagtgaaaccagtgttgaagaaactgcttaaattgtatgataagaactgggcactcattgaagaagagagttatagggccctggctgatgcaatatttgaggaggaagagaataaggtgaatgagccagaccagaataataaaaacaagaacggagttgtggacgatgaagaagctcatacgcatggggagcctgtgcgacctttgaagaggttgcgtttgagaggccaagagggtcaatctttgcgccctctgactagcagtggccccagctcagctgcatttccgttgaaagcgcctaaattagaagatggggcagtgcccgagagtagttccagacggcagcctcaaagcatggctgcattatctgatggaaatgcaaggattggtgctcgtcatgttcccccacaagatgctgttgtcgacaagggaaagaaacctatatcacctcaacttactcccagagcgagaaggtcccttgcagagccaacagttgaagcaggagctgctctgttggcaaataacaaaatgcctcatccatttattttgatcaagcccaaggatgagcctgttgatggtataccagattatgagattccccttgcagtgattcctcctgaaccatcaagtggaggagactctctaatgggtgcagctggaaagaaagattgccatgacactgtggtatcacagtgcagagatgaaaacgttgaacatgaatatgtttttccttcctcaaatgaagaagcaacttctaatgtagatgtagctttgtcgtctatgggtgaggaacaatctgtaaagataacacaaactgatgatgtttcaaaggaatctgagaccaatgactcacctattgtcagaggaaacaaagattcggtcattgcaaatggatcaatcagtgttgagtcttctgccatggctgaacttcaagttcctagttctataccctgctcgagtgatctggataatgctgtaccagctcccaagaaggttggaatgaatggtttcttacaaagtgatagtggaaaggagctggagcatcctataatcccaaattcacgtactttagtggttgttccaaaacatcagcttactaatgatgatgtaagggcagttcatgatgttaatgacctaacaaagggagaagaaagagtgaaaatttcatgggtgaataacactactaatgatttcccaccaccctgtcactacataccccgaaaccttgtgttccgagaggcttatgttaatatttctctatctcgtattgggaatgaggattgttgttcaacttgtatgggcaattgtgtattgtcatctaaatcatgttcttgtacaaataaaactgggggtgaatttgcttacactgcaaaaggcctactaaaggaagagttcttggatgagtgtattgccctcaaccgtgatcctcaaaattatttctattgcaaagcctgtcctcttgaaagatcaaagaatgatgattgtttagaaccatgtaaaggacatttaaagagaaagtttattaaagagtgctggagcaaatgcggctgtgggaaacattgtggtaatcgggttgtccagcgtggaataacttgcaagttgcaggtgtttttgacttcagacagaaaagggtggggtcttcgtaccttagaagatcttcaaaaaggcgcatttgtatgtgagtttgttggggaaattttaaccatcaaggagttgcatgagaggcgcttgaaatatcccaaaaatgggaaatatacatacccaattttattggatgcagattggggttcaggaattgtgaaggatagagaagctctttgcttatatgcggcatcgtatggaaatgctgctagatttattaatcacagatgtttggatgcaaacttgattgagatcccagttgaagttgagggcccaactcatcactactatcattttgccttcttcacatccagaaaaatagcagcacaggaagagctcacttgggattatggcatcaactttgatgaccatgatgatcatcctgttgagctgttccagtgcagatgtggcagtaaattctgtaggaatattaagcgatcaaatagatccatgagatcgtcaagttcatgatggtcattctctgctaaaccaattttgtggtctgatgcatgccatcgatcaatagtaactagtttcaacctactgagttggtctcttttgtattgtatctttcattattttgcttggaggttagatacaagttactattgacagtcttctaaaaactacaaggcagtcatgggacagaataagaaagaaaataacctctaggtgttaataactccgaacagttctgtcaaatgcctgtggatgattttgcctgagtttatgttgtgctgaatgcatgacacattaatggttaagaaaacttatttatctcgttc

SEQ ID NO: 169 - DNA, 1474 bp, Glycine max
taaaattgaaaaagtatataaattttctgaaattacgcaccaaaatctaaaagaaaaagaaaagtaaacgtacagaaactaaattgatatttgagtttcctcttataggcaacgaaggtaagaattttgtcgctagttgagtatcctttttcttattcctttgcacttttatttgtgctcgttcttcttctttcctttacacagaacaatagtagcaagcagagccccaagatctgtgcttgaaccttcacttgtgtttccttccttctgcagacgagcttcaccttgcgccgaagggccacagatggttgaaaccgatatggatgccgaaactgttgcaaatgtggttccaccaaaggagactccaaacagtgttcccatctcttatcattcctcacactcacaccctcctcttaatgagaggattatttcatccatgaccagaagatctgttgctgcacacccgtggcacgaccttgagatagggcctggtgctccaacgatcttcaattgtgtgattgagattgggaaagggagcaaggtgaaatatgaactggacaaaaaatcgggtcttatcaagatcgaccgtgttctttactcatcagttgtgtatcctcacaattatgggtttatcccacgtactatttgtgaggacagtgatcccctggatgtcttgattattatgcaggagccggttcttccaggttgctttcttcgggccaaagcaattggtctcatgcccatgattgatcagggggagaaagatgataagataattgctgtctgtgctgatgatcccgagtatcgacattacaatgatatcaaggagcttcctccacatcgtttagctgaaattcgtcgtttttttgaagactgtatccttccaaaaatgcaaattctaatgtttggttttcaaattttctatttgttaacgtctatgtacatgattaaatcatgaaatgcgttggtccttttcagtgcagcatgtgaaatgaatgttattgttgttttccttcataaaggatttagacaagaagaatgaaaacaaggaagtcgcagtaaacgactttttgcctgcctcagctgctttcgaagcggttaatagatccatgagcttgtatgcggactacatagtggagagcttgagacggtagtcgttgatgaatgatgcacgtcaaggatttttaactgacggaccaatggaagatgtttgcttgaaaaaaggctgcattatcaatattatgtaggaataaaaaaaaacattttactttagctgcctcttagctcatgcatgttctacaaactgtgcttaatttcaaatatgtcatccctgcaatatcaaatttacctgcctcttatagcacatgcacaatccaatatcaaatgttttaatcttgtataattttatattctcaccctttctattagaaagagtgtaatggttttttatattattttatgttgcttttttaaa

SEQ ID NO: 170 - DNA, 1939 bp, Glycine max
ctttgaatagctattagccgccagactctcaaatctcaaacgtacctaatgcttggtgccgcccccacttgtgtagaaatatcgtcactgcttgcgacttcaagcttaacagtacaaatttaattatgtcctataaatacaacattctcttctatgcgagtgtcattcagtatttgctctaagtgtattacttgatcaccttttttgagaaaagatatatatcaatggcaactccgagtgtgttagaagtccgccctcctgctttaacttccatctctgaaccacttccattttttgatggaaccacaaggttatacatttgctatctgtgcccttttgcacaacgcgcatggataactaggaactgtaagggactgcaagacaagatcgaattggttcctattgatcttaaaaacaggcctgcttggtataaggaaaaagtttatcccacgaataaggtaccttcgttggagcacaatagcaaggttttaggagaaagtcttgatttgataagatatatagatgccaactttgaaggggcacctctattccccactgatcctgccaagagagaatttggtgagcagttgatatcccatgttgatacattcaccagtggcatataccctacatttaaaggagatcctatacaacaaaccagtgctgcttttgattacctggagaatgctcttggtaaatttgatgatggaccatttttccttggtcaatttagtttggcggatattgcctatgtttcatttcttgaaaggttccaaattgtcttctctgaaatttttaagcacgacatcacagcaggaagacccaaactagccacatggattcaggttcgtagttctgtgcaatccaagaacatagtaatttgaaattaattaagttcgcattcatctataagatgaaatggaatggtctatttgaataaggcccgaccatcctcctaattttgatttcgttagatttttcttttccaaaatatgtacatgattttgtcaattgttaatgcaggaggggaataagatcgatggttataagcagacaaaagttgacagggaggaatatctggaagctttcaagaaaaagtttttggtattatgaacttcattcatcaactcatgataaattttggatcattttgtttgaaaatttgtggttgctgtcttgtttatgctttttgctagtttgctaaacgtttttcatgtttatactctgtaggcttaacagagaacgtgaattgcagccccgctgcatggtgtttaaagatatggaaatgtggaatgcttttaagatatagtagtcaataaagatttatttccatttgtggaatgtatcagaaaagcagcccacaacaccaatccagcccactcatcaggcccaagctcaacattgctcctagaagtttctagaatattttttgatgctatgaactgtttatgcagctgtcatgtatagctgttattagctatcattttgcataggtgtctttttaatagattccttcttatcctttgatatagcaatatatattttaatgtatgctgccaatgattaattcaaatgaagtgagcatttcatcatttttgtctaagttttcatccataaacagctcatagcatcaacaaatatactagaaactgctagaaacttctaggagcaatgttgagcttgggcctgatgagtggcagtgggctggcttgttgctgtgggctggcttgctgttgtgggctacttttctgatagaatgctttttcagtttaaaaatgatgtgttctatttgcttgttactttgacttctcattaatgcttttgtatgggaacatccaaatgtatagtcccgcaatctataataaataagttgaagacaagtttgacttggaattggtgacttgatgttatgtgcttatcatcagtatattttgttctg

SEQ ID NO: 171 - DNA, 1982 bp, Glycine max
tttcatctatgcttccgagtcttcaatatttccttaactttttcattatcacatttaatctcaattgcaaaatggtagaatatctgattatatcatacattaattaccctcaaatatcataactatggactacataccgtgcgcgtagatggaaacacatgtaaagggagcacactttgcacacattgaagatggatatcaaggaagcacaaagggtggtcatttccaaaccagttgcttcaaggccaacttgttctactttcaaatctttctcagagctcctagcaggtgcaatcaatgtttctcccgctattgaatcttctccaactacagtttctgccattagaccaaagacagtgaggttcaagccagcaatgaatcaaccccctgctgggtttgtttcttctcaggctgatacttttggagctgcactcgataattcttctgacatgagtcctaaacttgacaccaaacagtccctcatatacaagccaacagcaaaactcgtgtcaaagacaactgtgtctcttttggcaaatatgggaaattgcagtactaacacgagctcgaatctcgatcagagtattaccccgcaaacagaaacaaattatcagagcagtgaacctagtaagatggtgcagcagaacatagaggaggaccaaaaagctttaacatcctcagtgaattgtgatcgaccttcttatgatggatacaattggaggaaatatggtcagaagcaagtgaaagggagcgagtacccgcgaagttattacaagtgcacacatcctaattgtccagtgaaaaagaaggttgaaagatcatttgatgggaatattgcagaaattgtttataaaggtgaacacaaccattcgaagccacagcttcataagcgaaactcagcagcagggacacaaggatcaggggttatgtctgatggaatggttcaagatatgtggagtaatagtcacagtgagaggaacgaaggcaatgaagttagaattgagaacacaggattgtctatgcattcagattattatgtcaaagttccacagcctaatgattcttcattaaatattggtgcaactaatgctggtggaggaagcatggaaaactcttgtggtctaagtggggaatatgaggaaggaagcaagggatttgaggcacaggaagatgaacacagaagtaaaagaaggaaaaatgagaatcaatccaatgaagcagcattatcagaggaaggtttagtagagccgcggattgtgatgcaaagttttacggattctgaagttcttggagatggctttcgctggaggaaatatgggcagaaggtggtgaaaggcaatccataccccagaagttactttagatgtactaatatcatgtgtaacgttcgcaaacacgtggagagagcaatagatgacccgagatcatttgtgactacatatgagggaaagcacaatcatgagatgccactcaagaacacaggaactgtagcatctgaaagagattcacaggcttctcttagtaaagataaaccatgattgacacttcaattagttaacaagtatgattcaatagcattggcagacatctgaaataattcagaggatgcattccttttatatcctatagtatgctcagaataattgaagttgatcagaaagatcaagacattgacaatttcaaatgcagtacctacttagactaggatatttgttgataataaccgtattggtgctgataaattgtattatatatggaatcaagggcactggcttagaggactgcccttcaataactttctatctctgctagctgcctttgtatacaaaatcggtatattctattctatatcatcatatatgcattaatctggagtattatatatcatatgctaatagtttttattgtaaatcactggcatcgccagaaagaaccccaaaagacctttatacagtaatagctaatgacataattttgtttct

SEQ ID NO: 172 - DNA, 1491 bp, Glycine max
atggcagcagggtacgcatccggttattctctagaacacactccaacatgggcaattgccctagtttctttcattcttatctccgtctcaatcatcttggagcatctcattcatctaataatcaaatggttaaagaaacatcggaggagcgatttggttgaagcaattgagaggcttaaatcagagttgatgatcttaggattcatgtcgcttttgttgacagtaactcaagacgctataatagaaatctgcataccagtgatggctgcagatactatgcttccatgtcgtaaacgaactaacaatgctacttcaattttggattcttgcagtgccaaaaatgccagtaaagttgctttagtatcaaaacatggaatccatcaacttcacatgttcatttttgtcctagctctcatgcaaattgtgtacagttttctcaccgtgtctctggcaagggctaagatgaggcactggaaagcttgggatgaagagactcaaacagttgaatatgaaattgccaacgaccctaatagattcagatatacaaggcaaacaacattcggtagacggcacatatctactagtacgccatcaccagtatatgtttggattaaatgttttttcagacagttctttcactcagtagaaaaagttgattatctcaccctgaggcatggtttcatatcagctcacttttcagctaggaacaacgacttcgatttccaaaactacattgaacagtcacttgaggaagatttcagaatcatagtgagcattagccctgtgatgtggttcactgttgttatttttctgctggtggacgtacacggttggcatgtgtatctctggttatcctatgttcccctcttgctggttctggttgtgggaactaaacttgaagtcattgtcgaccaaatggctcttaaaatgaaagatgtcaataatgtgaccaaggggaccccacttgtttgtccaagtgacgaattcttctggtttggccatcccggatttgtgttaacactcctacattacactttattcgtgaatgcattcgagcttgccttctttatatgggtatcaacacagtttggaataaattcttgctaccacgaacacagaacatttacaatcataagggtggtgatagcggtggcagttcaagtcctgtgcagctatgttactctccccctctatgcactagtggcacagatgggttcagaagtgaagtgcaaagcattggctaaaatgctgaagcagtggcatgttgaggtgagggagagaaggaagaaccgagaacaactcaagtcttttagttttaggcacacaaacatgtcctcagaatggagccaagtaaataagactgcccctgatttttcttccacactatgtgaaagcattcgttcttctgatgaaggagaaattgtagaagaattggagcatatggataaaacaaaggcgtgctcatcaagtgatccacctggtgttgtgtaa

SEQ ID NO: 173 - DNA, 1929 bp, Glycine max
tatctgaaacaagacacgtacgtttgtcacttaccatagaaaagaaactcttgtgggcgacgtgtaaactaaatttccacccacttcatctttgctttattcctcacacaaacaaaccccattttcaaatcttctctcttctacacaataacatcaacaaggattgcagcacacacaaacaaatactctctctctctctctgcatgagaagataacaaacaaaacacctcattcttcatggctcaccaatcctcttcttctgaatctgatgaccatattccttctcatcatcacccattggacctaaacagtccccatccttctaaagatatcatcttcgacgacaacatggagctacaacagcaccaacaagaagaagagagcaacattaacaaccatgaatatgatggagataataatagagataaagatgataaggatgatgttactactacacaaaacccatctgcagcttcagaaaccaacgaggagaaaattgcattacaagaagaggcttcagatgatgttgttgttgaagcagaagaaaaagaagaggatagtggacgagagaggctgaatcggcatagagttgaagtggcagggagggtatggattccagagatatggggtcaggaggagctattgaaggattggatagattgcagtgcatttgatgctcctttagttccaagcagaatctccactgcacgaaaggctttggttgaagagtgtacaagagccaatgctgctggactaataatagagaacagggaaaagacagtttcgtatagttcggattaaaagatgcatcgtattttgtgggacttggatttcaatgtacatatggatttatcccttaataacaactgcacaaatgtagaggtccaaaacacctgcacattttcagacaccgagaagagcaccaaaacaaaaggatctgatgcaagtccaaaaacacacgaagaaaatgtgcagttgtaaataaagaaatatctggccttggtttgtcaagtcttttgctactcttgtccttgttatcaagtacaaagagatcaagaattccagcttattgatattcacaaatagccaatagaattattgaatcacaaagtgtcagtgatttaaagtgattgattttacaccggaaaaggaaactagtagtgggcacacaaagaatctgatgcttctcctttctgcaaactctttctatactatagactgaacatacaaggataaaatatctatatgctcccactggcatccctagagttaaagttacatgcatgccaaataattacacttgttctcctcaccagtactcaaaactcaaaagaagggggaaaagggggtcttaaggtgagggagcagcagcctatgacgtcactggggttgatgagcaaattttctggtcataaaacccgaaaattcacagcataggttagctggacatttaaactttaaagcaagtaaagcatatgcaatatattgtacatccacaacttagtaattgttattctcttaattagaattaggatacccagcagctgtaactttgtaactgtagtcgtctccttaattaggctacccaactgtaggataaatgtatatatagcagttcagctaattattgggctgaaaatcatattgtattgtgtgtgtgtgtgagagagagagacagagagagaattcttatttctccagcaggagaacacagtttttgccctacacttttctgaatttggcatatgaatatattcggttaacattctcagctgcagattctataatattcaattaatgaacaactagtaccaagcataaatcgcctgttttttgagtgattacacactacatcctgacaagataatttatctattagtcaataggcccacatattacatttagaatggtcataaggtggcatttgaa

SEQ ID NO: 174 - DNA, 1682 bp, Glycine max
cgcaaccatgataagaagcaagcaaattggtaataagacagggccgtaggggactgcgaatgtgagtcttcttccattgtcagcctcagactcagggtttccactttccgctcacatggaaaatcaaagagatccggtgtagaaatctcgtttctcagtcatcttaatctcaatggaatctattggtaaagaagaaaaaattgcttgtgtgatcggtgaccgatcaactagtgatgttgttgtgaggctacgcacacaggaaggtcgagatgattggctgtactgccattcagagattcttgtgaagaactgcaagtattttgctgatcggttgtctgagaactggccaacatgtcagatccttgattcccgcaactgtgttgatgtctattgccaggagttgaattttgattaccatgaatgcccttggcattctgcaggtcgctgttgagcttggatgcccacaaattataaatgcctgtgtgaattacttagaagcggtgacatgggaagaggctgaggaggatgagatattgaaaattgtacctcgaatgggattacaggcagagcctatcctagctagacttcaaccagttaaccagtctgctattgtaaacatctttgtctctgccctccgctttgctacatcatctccacctccacaactgaatgatcttaagtcttcggcacaagagcaacttgagtacatgctaactgaagatgatgatgcccctttgttgacagctgatgacaacataaaacttgaggttaaagaatgtgtaaacagactactttcccggtttaacgactcattaacagctttgttctgtggttccacagaatcactctctgaggctggaaatattcagttgtttaaatcctatttgactgatttgtcatgggcttgtcagatattgagtaagttggaaattatgagggagtttgttgagtattggtttgatgcatcggataagattgtcaaggtgcttgaacaaggaagttctacaactgaagtaattgagataaaattaagagctattgaggtgacatcaaaggttttagaggcaattgggtatggcactgttatattgccaactgcaaaacgccttcaggtcttgaaagtgtggcttccatttgtgagggttacaaaaccattgattgattctgtcacgatgaattgtgagaatgccatgcttcttaaattagatggcgaaatgtggcaatccttagaatccacgtttgtgtctatcattcttgcattgccttcaggggatcaagcagaggttttaactgagtggctggataatgagtacatgcagtatccagacttaactgaggcatttgaagtgtggtgttataggtccaaggtttctaagagaagactatcattgctagaggatgagcatgccatgactaactcattttgatgctttcacaaattctgtttctttatattagactactaatccaagatttctaccttgtcaaggcatttgaagagatcatctcttttttgcacatgaatggaaatttttgtaggaggcatttaaaatctccatttctcatcaattcaatgtaaattatggtgaagagtttgtaaaatgttgtagtttctaactatgaactgtaaaggatgtatttttgaaataattgattacatagtaagcaaaatcacgatacta

SEQ ID NO: 175 - DNA, 1144 bp, Glycine max
ctttaaaaaggtctgcaagtgctacgcgagttgcacgcattattagaatattaacattattatgtagggacaaaaagtttcaaatggaaatagtcaagcactcaagcaaatacttcctagttcctattgaagttaagagttatatcatttcactttctttattggtttacgagtttcgtttaatatttgttccccacagatcttaacacttcaaagttcaatctccccattttcatttttccatagcataagctaacaaaataagaaaaatgaagttgaggtcttcaatcgcatttatttgcattctggcgagtgtgagtgtgacaatttcagaatcattaagccaacaagagcaattgtcagcatatgaagttcttgagaaatacgatctcccagtggggcttcttccaaaaggtgccacagggtatgagctaaacgaaaaaaacgggcacttcacagcgtatttgaatggaacatgctacttcagcatagagtcgtatgagctaaagtacaagtccacaatcaagggcgtgatctccaagggcaagttgtcgaagctgaagggtattagtgtgaagattgaagtgttgtggctcaaaatcgtggaggtcactcgcgacggcgatgacctccaattctcggtgggtgttgcctctgctggcttcagcgtcgacagcttctcagagagcccccagtgtgggtgtggattcgattgcaactatttcaatcaaaacggtgatgtttcttctctttagatttaatttggatcagaatgaagaattcggatctatctgttactatgtttttttttttcatccatgattaattattgatcaccatcatgttgttttcctttgcgtaaattatgactatggtggtgttttgcggtagacactaaacaaaagcagcattggctgcatccccactttggcttgtcgtcaagtcttacttttttcaaccaacgctgtcgtccctgggttttagaatcttgataacaaagttgataacattaatatggatatcctccaatctttctaaattctcatattaatctcttgttttgtatttccaaaacattaaatatatttattttccacttaaatatttttttagtctatctaatttagttttttttttgttttta

SEQ ID NO: 176 - DNA, 4868 bp, Glycine max
ataaaatcagagaagattcgtcttttaaagcttcatcacgctgagctgacacggctttctggatcactcacgtatttcacgttgttggcgttggtttcagaaagtggggaaagtaaaaacaagtaattaaaaaaagggtggggaaagaataatggatggttgggtaattagaaatctgcgggagttgaaggtggttgagggatataaaatcagctgcatgtaatgtaactgttagtgtaagtatgcgttactaaaaagtggttgtgtgagataagaaagaacaagtagtgtggtcaagacttggttgtttggattgtgaaatctctgtgcattggaagagaagatgtcgcagataccgaaggagccggagcaggtgatgaagatgagaggaggatgtgtgttgggaaagaaaacgattctcaagagcgaccatttccctggttgccagaacaagcgtttgtcgcctcagatcgatggggctcccaattatcgccaggcatctgactcgttgcatgttcacggtgttgccattccaaccgttcatggaattcggaatgttctcaatcacattggcgctcgattgaaagttctctggataagccttcgtgaggaaccgcttgcctacattaatggccgtccctttgttttgcgtgacgtggagaggccattctccaatcttgagtatacgggaattaatagggaaagggttgagcaaatggaagctcgtttgaaagaagacatcctcgcggaagctgcaagatatggaaataagattcttgtgactgatgaactgccagatgggcagatggtggaccaatgggagccggtgtcatgtgattctgtgaagacaccactagaggtgtatgaggaattgcaagtggagggatatcttgttgattatgagcgtgttcctataactgatgaaaaatcaccaaaggaattggattttgatattctggttaataaaatttctcaagctgatgtaaatacggagatagtttttaattgtcaaatggggcgtgggcgaactacaactggaatggtcattgcaactttggtatacctcaatcgaattggggcctctggatttccaagaagcaattcaatcggtagaatttttcaaagtatgaccaatgttgctgatcatttgcctaactcagaagaggcaattcgcagaggagagtatgcagtcataagaagcttgattcgggtgttagagggtggtgttgaggggaaaagacaagttgacaaagtcattgacaaatgtgcttcaatgcagaatctgcgtgaagcaattgccacctatcgcaatagcattttgcgacagcctgatgagatgaaaagggaggcatcactatctttttttgtggagtacctggagagatactactttttaatatgttttgctgtgtacattcattcagaaagggctgcactccgttctaatactgctgatcactgtagttttgctgactggatgagagcaaggccggaactctacagcattattcgcaggttactcaggagagatccaatgggtgcacttggatattcaagtttgaaaccatctttaaagaagatagctgaatctactgatggccgcccttctgagatgggtgtggttgctgccttgagaaagggtgaggttcttggtagtcaaactgttctcaaaagtgatcactgtcccggatgtcaaaacccaagtttacctgagagagtggatggtgctcctaatttccgagaagttcctggatttccagtttatggagtggcaaatccaaccattgatggtattcgatctgtcattcgaaggattggtagctccaaaggtggacgcccaatactttggcataatatgagagaagagcctgttatttacatcaatgggaaaccatttgttcttcgtgaagttgaaaggccatacaaaaacatgctggaatacacaggcattggccgtgacagagtggagaaaatggaagctcgattaaaagaggatatcctgcgggaagctaaacagtatggtggtgccataatggttattcatgaaacggatgataagcatatatttgatgcttgggaggatgttacctctgatgtgattcaaaccccacttgaagttttcaaaagtctggaagctgaggggttccccattaagtatgcacgtatgcccatcactgatggaaaagctcctaaaagctctgattttgacactttggcaaataatattgcttctgctgcaaaggacactgcttttgttttcaattgtcagatgggtaggggcaggacaagcactggtactgtcatagcttgccttgtgaaacttcgaattgattatggtaggcccattaaaatactgggtggtgatgtgacccatgaagaatcagactgtggttcttcaagtggagatgaaactgggggttatgtcaatacattatcctccaatacattgcaaagaaagacagacgatgaacaaaatcgtgcttttggtataaatgacatccttctgttatggaagataacaacattatttgataatggtgttgaatgccgagaagccttagatgctattattgatagatgttctgcacttcaaaacattcgtcaagcagtcttacagtatagaaaagtattcaatcaacagcatgtcgagccaagggtaaggagggtggcgttaaatcgtggtgctgagtacttggagcggtactttcgtctaattgcttttgcagcatatcttggaagtgaagcatttgatggattttgtggacaaggagaatccagaatgacgtttaaggtttggttgcatcagaggccagaggtgcaggctatgaaatggagtatcagattaagaccagggcgatttttcactgtccctgaagacttgagagaaccacaagagtctcagcatggtgatgcagtgatggagaccattgtcaaggccagaaacggttctgttttggggaaaggctccatactgaaaatgtatttctttcctggtcagagaacttccagtcacatacaaatacatggtgcacctcatgtttacaaggttgatgaataccctgtgtattgcatggcaactccaaccatctctggtgccaaggagatgctagactatttgggtgctaagcctaaaccttccctcactgctcaaaaagctatattgaccgatctgagagaagaagcagttgtttatatcaattatactccctttgtcctgagggagttaaataaaccagttaatacactcaagtatgtaggaattactggtcctgtggtggaacacatggaagcacggctaaaagaagatatactagctgagattaggcagtctggtgggcgaatgctattacaccgtgaagaatataacccctcaacaaatgagtcaggtgtggttggatactgggaaaatattcgagcagatgacgtgaagacacctgcagaagtttattctgctcttaaagatgatggatatgatattgtctaccagaggatacctttaacaagagagagacatgctttggcctctgacattgatgcaatacagtattgtcaagatgactctgcaggtagttacctttttgtatcacacacaggctttggtggagtcgcgtatgcaatggccataatctgtatcagacttgatgctggatccaaagtctcacagccattattcggtcctcatatagatgccgtgactgaagaggacttgccttctcaaacttctaatgaaatggcacttagtatgggtgactatcgtgacattttgaaccttacaagggtcctcatacatggtccccagagcaaagcagatgttgacattgtcattgaaagatgtgcaggcgcagggcatatacgagaagatattctttattataatagagaatttgagaagttcatagatgatgatgacgaggaacgtgggtatcttatggacatgggtatcaaggctttgaggcgatattttttccttatcacattcagatcgtatctctactgcacctctcctgccaatacggaatttgcagcatggatggatgcaagaccagaacttggtcatctatgtaacaatctaagaattgataaataatatggcaatgtttataataatgttgtcagtgttcagtgggcatttgtagttacaatttgcgccacctattcctcatgctgcacaataccttatctttgctacaaagcctcacgtgtagtagactatgcacacatgctacttcgtaaaccgctattatctcaggcgagcagcatcctgcactcagtttctgtctagctttgtctgtcatgagaggctgacactcacacaaggcatgaatgttggtgaaccgaagtgttcatcggagacctgtaaggcagtaggttacactgctgaggaatgttatagtatctcttccaaaggttgtatttctatttgtttgttttggagggtttgtaaaggatgaaatgtagtgattcgataggatgggaagagatatctttctagtgaaagggagggaggaaggttccctatttctgtaaacccttacccatgtttcattaatgtccttaagaatttagttacttcactcaaattcaattgtatttttgaattttatttccctttatcgaagaagttgattctctcttggcttaatatagttaaggagaatatccatgccggttaagcccattagccggtttatcacgtgttcttctcgttgatcttaactagtcagttcttgctttctgtatttctgttatatcagttcatttttgtgaagctttttattggaaaggaaatgcttgttgcacatcatgcatctcattcatcagctcagtagtatgaggtcgcatagtcagagtcccggtgagtagaaatt

SEQ ID NO: 177 - DNA, 2497 bp, Glycine max
ttctgatttccgagacccactgtattgtttccctctgtttctcttctccctttattccctgcctgccatttttatttttatttcttaaccatttatttatttaattagtgcttccccctcctccattctcattctccctgcatcacatacacacatcattctctctctccttttgacctaaatcatcttctgctgattccgcgcatttttctgtgacgaattgctcccaaattaggtttcggttaacagtgctcgtgattttggtactattgcaattaggagtgattgcgaaggtgcactgcatgttcgattgttgaggagagggggtcctctgttccgaggattcccgtcgctggttgttcagattcgaagttggctctaaattttcgttggggaaatgtttgcttcggttgcggatggggcatttgaggggagtggagtttcaggaccctttttgattccacagcgctttgtttggccttatgggggaacaacggtgttcctaaccggttctttcaccagatggtcgaaccatatagctatgtctccgatggagggatgccctgctgtgtttcaagttgtttgcaacttaatgccggggtttcatcagtacaaatttaatgtagatggtgagtggcggcacgatgagcagcagccatttgtaaatgggagctgtggagtagtgaacactatttatatagtgagagaaccagatatcttaccttccatcttaaatactgaaacacctggtcgatcacacatggaggttgacaacatggaagctaatcccaggatgactgtgtctgatctggaggtttctcgccaccgtatatcggtattcctgtccacgcatacttcatatgatttgcttcccgagtcaggaaaggtcattgccttggatataaatttaccagttaagcaagcattccatgttctttacgaacagggtatatctatggctcctctatgggatttttgcaggagccagttcgttggagttcttagtgcaatggacttcattctaatattgaaagagctggggaaccatagttcaaatttgactcaagaacaactcgagactcatactatagctgcctggaaagaaggaaaatttcaacaattcagaacacttgatagtaatgggggatcatatccttggcgatttgttcatgccggaccccatgaatgtcttaaagatgtggctttgaaggttttgcaaaacaaggtgtcatctgttcctatcatccactcttcttcagaggatggttcacatcctcaactgctacatcttgcttcgctatctggaatactaaaagttatatgcaggcagtttaagcactccttgagttcttttcccattcttcaacttccagtggcttcaatacctttgggtacatggatgcctagagttggggaaccaaatggacggccactagcgatgttgatgccaagtgcttctctcggtgctgctctttcaatgtttgttcaagccaaagttagctcaataccgattgtggataataatgattcgttacttgacatttattcaagaagtgatattactgcattggctaaagataaagcttatgctaggatatctctcgatgaaattagtattcaccaggcattgcttttgggacaagatgcaacttctccttatgggctttacaatggtcacagatgtcacatgtgtttgagatctgattcgctttacaaagtgatggagcggttggctaatcctggggttaggagacttgtggctgtggaggctggcagcaagcgtgtggaagggattatttctttaagcgatgtgttcagattcttgttaggctagttgggatatattggccggcttatatgaaggaaatagctgtggttggcattggaaggaactcgtttgttctatttgcactgcttttctgagctatccccagtcttccttggtgctgttgccctcgtatactgttttaggatagaaactggagagaaaaatctgtaaattgaggatcgtttttctccgttaaacatcttaacgaaattgttttctccttgtgtgccggcacatctgcaatacatgtgtccagtgctaatagagatcaaggagaagctgtgggaagaaaaaaaaaaaagactaggaaaagataaaaatataaagccgtatgcagcaccatgcgctaatagaaatcaaaggagaaactgtgggaagaaaaaaaaaaaataaagactaagaaaagccgtatgcagcagaatgctgttggatggagttggttgtatcgttgtattttaagagtcttattttttccggatcatcatgacttcagatttcagctggcaagttcatccgagcgtttccaattgagaaggcttcttgactttcttttagtgggttttacatggttacatagaatttaaaaacttcaagcatatgttccaatggtgtaattccttttcacaaaaaagaaatggtgtaatttttaagaggttgaaaagtatttca

SEQ ID NO: 178 - DNA, 3063 bp, Glycine max
tttgaacttcgtctggattccgaggttagcatggaattgttgcaaaaatgatgtagcatgttctggaaacccgttgagaagtactaaatcattttctgcaatgcaccgcgtgggtagtgcaagtaatggaaacaattcaactcgccctcgtaaggagaagagattaacctacgtgttgaatgattctgatgacataaagcattgtgcaggcataaattgtctggctctacttacgtctgcggcatctgatgggtctgattatctcttcaccggcagccgtgatggcaggttaaaacgatgggcactaggtgtggatagagcaacatgcttggctacttttgaatctcatgtcgattgggttaatgatgctgttcttgttggtgatagtacacttgtttcttgttcttcagatacaacccttaagacatggaatgccttgtcctttggaacctgcactaggactctccggcaacactctgactatgttacttgcctcgcagcagcagaaaaaaataacaatattgttgcctctggtggccttggtggggaggtttttatatgggatatcgaggctgccctcgctccagtctctaagtgtaatgatgatacagttgatgaatcttcaaatggtatcaatggttctggcaacttactaccattgacatccttgcgtactattaactcaagcgacaatatgtccatgcacaccactcaaactcagggatacattccaattgctgccaaaggccataaagattctgtttatgcactggctatgaatgaaagtggaacaattcttgtctctggtggcacagaaaaggttgtgcgtgtctgggacacaagatcaggatcaaagactctaaagctaagagggcatacagataacatcagggctctgcttctggattctagtggcagatattgtttatcaggatcttcagactctatgataaggctttgggatataggtcagcagagatgtgtgcattcttatgcagttcatacagattctgtttgggcactcgccagcaccccagcatttagtcatgtttatagtggcgggagagacttttcattatacttgacagatttgcaaactagagagagtagtttgctttgcacaggcgagcaccctattcttcaattggctttgcatgatgatagcatatgggttgcaacaacagactcttcagttcatagatggccagctgaaggatgcaaccctcaaaagattttcctgagaggcaattcttttttagctggaaacttatccttttcaagagcaagagtgtcactagaaggatctactcctgttcctgtatataaagaacctaccttaactatcttgggtacacctgcaatagtacagcatgaagtcttgaataataagaggcatgtgctgacgaaggatgtgtctggttctgtgaagctgtgggagattaccaaaggtgttgtgattgaagattatggaaaggtttcatttgaggagaaaaaggaagagctatttgagatggttagcatttctgcatggttcacagtggataccaggcttggaagcttgtcagtccatttggacactccccaatgtttttcagcagagatgtattcagctgatcttaacattgtaggcaagcctgaagatgataaggttaatttggctcgagaaacccttaaagggctactggctcattggttgagaaaacgaaagcaaagaatgggatccccagctccagctaatggagaattattatctggaaaggatatttcttctagaagtagtacccattcaagaattgaggctgatggtagttctgagaatgatgctatggtttatcctccatttcaattctcagttacttcccctccttccattattactgagggctctcatggaggtccatggagaaaaaaaattactgatttagatggaaccaaggatgagaaagactttccctggtggtgtctggactgcgttttgaataatcggttacctcccagagaaaatactaaatgcagtttctatttgcaaccatgtgaaggctcttcagtccagatcctcacacaagggaagctaagtgccccacgtattttaagaattcacaaagttgttaattatgtaatagagaagatgttgcttgacaaacctttggatagcttaagtgctgaaggtagtattgcccctggtcttactgggtcacagtcacagcatcaagcagttggggatggatcttttcgatctggatttcaaccatcgcaaaagcttaaaccttctattgaaatattgtgcaacaaccaggtgctgtctcctgaaatgagcttagccacagtgcgagcttatatatggaagaaatcagatgacttggttctaaattacagactagttcaaggcagttgactacaaattgcatatgcatcagagattggaggaaagtgagctttaaccatgtcagaatggtcattattggttttcttgtgattatgtaaaaatacttatcaacaccaattcttcttgggttgcctgcattgatcggtggtattatagaaatttgtaaattctgagccgtcatttatcaccaaatttagtgacattctccaaacctgcttggatagttttttctttagtggaaagctgttactgtaaattttgaactatatcttgctggcgtgcatacttctgctggatatggcgaaatcttctgcatctggcatgatgatgaaggtttttaattgactctgctgagaattagggggaatcatactggcatggtggggtgtttttcaggaagcaggtagttgatttagagatgacaacgaaaacattgtaaatttaaattgtgcgttaaatatctcggcatagaaattatgatgtccaggtgcatatttacatcataaaattttgttaattgttaattgctaataatattattctcatttattcaaattagtcatttgacatccagtcatgtttatcagtgtatgcatatttgagtgtattcaatttgcaattctgaaaattaggcaataaataggcattatcattactgtgacggtattaattgtagc

SEQ ID NO: 179 - DNA, 2535 bp, Glycine max
ttgattatataaactatctcttaagcttaatattgcaccggtgcaatctgcacaagattcaccaaatgggtggtcgaagttggagcacttgtctaatgcatcttggtactgttgcagtttcctaacatcctggaaaacgaggttggagcatttggaactgccaaggtacaagctttgaaagccgcatgaattaagggacattccttgctgcgggtgaaatgtcttggcacaactctgcgactaatcttgggaaatgaacacttgtcctcctgagttcaggggttgcgatgccaacgcattcgacaaaaccgtcagagcatttcgacagcacaaggttgtcgggaacccatcgtcaccccacttgtctaaaacctcattcacatcgccgcactcaccaaatgccacatattgggacgtgttgaacttcagcacacatgtacctgcaccacagcaccatattgtgaagtgggccttgacagaaggtattggacttggaaatgttgagtccatttaaaaggaaattggaagcaagttgaagcgtcaacgtgtctgctgtggttgcagtgacgggtctgtttgcagtccacacgaacaccatcatcattatgttcttatctcactcatgcgatggcgactcttgtttcttcttcttcctcttccttttacatttccttattctatttctcattgtacctgcaattggcctcttctacgttgcaagtatcaggttacatttggaggtgaggacatacatatacatatattattattattgttactattattattaggttatatgtatatatggcaatgtggggtggacactcaatgttgttaaccaatggggaaggcacaggcactcccaatgtacgtataaaagcaggccttacggttagaggtgatttaaggtttcacagaacagcagggtttaaatatggtcctagtgtggtagtgctcaaagttttttccaccgccaaaaggccaacacgcttgcgcttgataagaccttattgcagtttgaggggacaacacaaccaagggaaaggatattcttctctcacttctacacaaaaaccacggcaactgatgttgaaattcgaggcagatcgaatgcttgtttttctcaaagattggagtaatatacgcatcacggcagtagctgccatattggtatccattttaatgatcattccaccagctgatgctgttgatgctctcaaaacttgtgcttgcttgttgaaggattgcaggatagaactagctaagtgtctttcaaacccatcttgtgcggccaatatcgcttgtcttcaaacttgcaacaatagacctgatgaaaccgaatgccaaattaagtgtggggacctgttcgaaaatagtgtggttgatgaattcaatgagtgtgcagtctcacggaagaaatgtgtacctaagaagtctgatgtgggagaatttcctgctccaaatcctgatgtccttgttaatagctttaacattgctgatttcagtggcaagtggttcatcactagtggcttgaatcctaccttcgatacctttgactgccaattacatgaatttcacacagaatccaacaaacttgtgggtaatttgtcatggagaatacggactccagatgctggatttattactaggtctgctgagcagagatttgtacaagatccttcctatcctgggatcctttacaatcatgacaatgagtaccttcactatcaagatgactggtatattttgtcatccaagattgagaataagccagatgactacgtatttgtatactaccgaggcagaaatgatgcatgggatggttatggaggtgctgttatatacacaagaagtgcagttttgcctgaatctatagttcctgaacttgaaaaagcagctaagagtgtgggaagagactttagcacgttcatcaggacagataacacatgcgggccagagccttccctggtggaaaggctggagaaaaaggtagaggaaggagaagagaccattgtaagggaagttgaacagttagaagaagaggtggagaaggtggggaaaacggaggccaccttgtttcagaaattggcagaagggttcaaagtattccaagaagatgaggagaatttcttaagagggttatcaaaagaagaaatggagattcttgatgggctcaaaatggaagccggtgaagtagaaaagctctttggacgtgccttgccgataaggaaactaagataagcctgagaaccatgtccaagataacttgacatcataatctttttgatcatcttaaatttatctttgcttttattcattgactatatatattgcatggctttagaaatctttcctccctaatcattgcttttatgctgacatactaataattattcaaatattacgtaacagcttttatcaattgttgtatatatattcagagtattgtatttgcataggtttagatgcctgtgctctttttcagttgaaaatatttggattgggaattccgacatgaggaatgctgtattctac

SEQ ID NO: 180 - DNA, 1921 bp, Glycine max
aaagacaccgatttaggggttaaaaaatatcgattaacctctgatatttctcttagctgcagcctgcagtgagactaagaaaatctccgaacccgctacttcctattttctatcctttcaaaagagaaactggaaaagttagctaaacgtcatagctagatcgtcgaacaaaacgaaaagaaaagcgttgaaaatggctcaggagtcactctcagaaacccctgatatctcgcccccttcgtctactgcacaatcgctgccagatccatctctttcaaggaacgtttcttttagccggctcaacgcacaggcaccagaatttgtgcccactcgcgtctccccacggggcgattttcagcaacctaggctcgttgtaccttctccttctccttctcctcctcctcctcctcctcctcctcctcctgcgtcaggtatggtacacgtttactcaccgcccccaacttcacagttccatgtaccgattcaaggccatgtcgtcccggtccagaatcaccaccaccatcttgcccatcagcaccacgttccggctcactaccgctctcatcatcacccgcatcagtattatgttagctccgattctgccgtgcagcagcctcaagttgacccagatcatgctccttccaaaagcaagatgtctgacgaagccagtcagaaaattttgaatcaggtggagtattatttcagtgatttaaacttagctactaccgatcatttgatgaggttcatcaacaaagatccagaaggttttgtgcctatatctgttgttgcatctttcaagaagattaaggccctcatagccagtcactcccaacttgcaactgttttaaggaactcgtcaaagctcgtggtcagtgaagacggaaagaaaatcaaacgccagtatcccctgactgagtctgatatagaagagctacaatctcgcattgttgtagctgaaaacctacctgaggatcactgccatcagaatcttatgaaggttttctcagcagttgggagtgtgaagactatccgtacctgtccacctcaaacttccaatagtggggcttctgctacttcaagattgggaaaagttgatgggatgcctttatctaacaagttgcatgcatttgttgaatatggatctgttgagctggctgagagagctgttgctgagctgaatgatgagggaaactggcggagtggcctccggattcgcctgatgcttagacgcatgtctaaacctgctcaaggacggggaaagaagggacagagggcctctaatagaatgagataagaatagagagaggaatggtcaaatttctcattaccctgtttttgttttgccagacttctcccaacagagcttgtactctgaattcaaggacagagggcctccaatagaacgagataagaatagagagaggaatggtctaatttctcattaccctgttttagctttgccagacttcccccaacagtttgtggtgcaaactgatgcttagggttttgcaatgggagcagtgctactccaatcaggctacccagtagcctatctcaggcacgatcccttttaacagaattctaacaagagccttctagaactagctgagtcactctctcaatacaattaacagatattcaaataactaatgataaagcacatagtcattccacatcttaggtgtagtaatagtatgcttgggcctaaggtccacttcattgggctgctccttgtcaccatgctggaccatatcagttgtttagttacatctgttatgttagttaggctctatataaacagagcttgtaatcattcaacactttggttgaataataatatcttcctcattctcaaactctctctctctctctctctcaatatcaaactctattaaggggcattctggaagtttttagacct

SEQ ID NO: 181 - DNA, 1140 bp, Glycine max
atcagctgccattgaagccacgaagcaaagagattgagagtggcaattgcaatgttctcacagtgccattttctctctcactccccaattcccaatactacctttcgtctcagagccatggcgcctcacagcacgcctcttgaactcaatcgcttcgccgaggtcggtaacaaagtcgccgatgctgccggagaagttatccgcaaatacttcagaaaaaacttcgacgttattcacaaacatgatctcagtccagtaaccattgcagatcaatctgctgaggaggctatggtttcaatcatactagacaatttcccttctcatgccatttacggagaggaaaatgggtggaggtgtgaagaaaagaatgctgattatgtttgggtattagatcccatagatgggactaagagctttattactgggaaacctgtatttggtactctcgttgctcttctacaaaatggcacaccaatccttggcataattgatcaacctgtgttaagagaaaggtggatcgggatagcaggaaagagaacctcactgaacggacaagaaatatctacacgcacttgtgcggacctttctcaagcatacctgtacaccacaagcccacatctgttcagtggagatgcagaagaggcattcattcgtgttagaagcaaggttaaaattccattgtatggctgcgactgctatgcatatgcacttttgtcttctggttttgtggatcttgttgttgagtctggtctgaagccatacgattttcttgcattgattcctgttattgaaggcgctggaggtgtcataactgattggaaaggagataaactgttttgggaagcttctccactttcaatcgccacaactttgtcttatttgcatgtggcaggttttaatgttgtggctgctggtgacaaacagattcatcaacaagctctagattcattgcagtggaagtgatagcttgaattaatcttcagtgcaaataatcttctctgcaaatggtcttgattcagatgttcctaaggacatgtattaccgtaccattttctggcatttaagttgaaaaccatgtactcagaatcttgaataagttcctgcagaaattaacctctttctctattggttggtcacgaa

SEQ ID NO: 182 - DNA, 1560 bp, Glycine max
atggcttctgcttgtgtgaccttgaaatccaatacccatttagcaaactctgagaagggctttctaggagaaagaataaaaggtggcttcaacaacagtgccttggtaatgaatcagttggctatacgttctagaagccacaagagggtgaaacatggtgttggtgttgtatctgctgttctcacttcaaacaatgccaaagaatcactgaccttgcaagtgccttcctttttaagaagaagggctgatccaaaaaatgttatttccatcatattgggaggaggacctgggacacaactctttcctctcaccaaacgtgctgccacacctgcggttcctgtgggtggatgctacaggcttatagacatccctatgagcaactgcctcaacagtggcatcaacaaaatatttgtgctgacacagttcaactctgcatccctcaaccgtcacattgcccgcacctattttggaaatggcatcaactttggggatgggattgtggaggttctggcggctactcaaacaccaggagaggctggaaagaattggttccaaggaactgcagatgctgtgaggcaattcacttgggtatttgaggatgccaagaatacaaatgttgagaatgtattgatcttggctggagatcatctatatcgtatggattacatggaccttgtgcagagtcacgttgatagaaatgctgatattacagtttcatgtgctgctgtgggtgacagccgtgcatcagattatggattggttaaagtagatgacagaggccgcatcattcaattttctgaaaaaccaaatggtgatgatctgaaagcaatgcaagcagatacctctcttcttgggttgtctccccaagatgcattgaagtcaccatatattgcatctatgggggtttatgtattcaagacagatgttttactcaatcttctgaaatggagatatcctacctccaatgacttcggatctgaaatcatccctgcagctgtgagggatcacgatgtccaatcgtatttttttgaagactattgggaagacattggaacgataaaatcgttttacgatgctaacttggcccttactgaagagagtcacaagtttgaattttatgaccccaagattcccatttacacatctccaggattcttaccaccaacaaagattgacaaatgccagattgtggatgctattatttcccatggatgtttcctgcgagaatgcacagtccaacactccattgtgggtgaacgttcacgtttggattatggtgttgagctcctggacactgtaatgatgggagcagactattaccaaactgaatctgaaattgcttctctgctggcagaggggaaggtcccaattggtattggaaggaataccaaaattagaaactgtattattgacaagaatgctaagatcgggaaagatgtcatcatcgcaaacaaagatggcgttcaagaagcagatagaccagaagatggattctacattcgatcaggaatcaccatcataatggagaaggcaaccatagaagatggcactatcgtataa

SEQ ID NO: 183 - DNA, 1644 bp, Glycine max
atggctggtggtgctgctactgcagaaagaagcttaaaggagacacccacatgggcagtagctgctgtttgttcagtgttcatcatcatctctgtattaattgaacacggaatccattcacttggaaagtggtttcaaaaacgacataagaaggccatgaatgaagccttggagaaaatcaaatcggaattaatgttattaggattcatatccctattaataacttttggtacaaaatacattgcaaagatatgcatccctgtgtcagctggtgacataatgcttccatgcaagaaggtggaagtgtcagattcagatgatgactcaaatgacagaaggaagctactttcttttgacgacaacgtggtggaatggcgtcgagttttagcagctgcatctgggggtgactattgctcacaaaaaggtaaagtgcctttgatctctcagtctggggtgcaccagttgcatatatttatatttgtcctcgctgtttttcacattttctacagcgtcatgaccatggttctagccagagcaaaaatgaagaaatggaaggcttgggaagcagaaacatcttccctggagtatcaatttacaaatgatcctgcaaggttcaggttagcgcatcaaacatcattcgttaggcgtcactctggttggtctaggatgccaggaattcgatggatagtggcattcttcaggcaatttttcgggtctgtcactaaggtggattacatgaccatgcggcacggatttattaacgcacattttgctcccgatagcaaatttgactttcaaaaatacattaaaagatccatggaggacgactttaaagtggtcgtgggtataagcattccgttatgggtttttgcaatcgtctttatgcttgtgaacgtttacaaatggtacacgctcacttggctatcattagcaccactagtgatacttctattagtgggcaccaagcttgaacttataatcatggaaatggcccaacaaatccaagaccgagccacaattgttagaggagtccctattgtagagccaaacaacaagtatttttggtttaaccggccccagtggattatcttcttaattcattttaccttgttcgagaatgcattccaaatagcctttttcttgtggacatggtatgagtttaagatcacatcttgcttccatgaaaacttgcccctaatactgacaagggttgtccttgggatagccttacaagtcgtatgcagttacatcacattccctctctattccctagtaacacagatgggatctcacatgaagaaaacaatctttgaggagcaaactgcaaaggcacttaagaaatggcaaaaggctgcaaaggacaagagaaagttaaggaaagcaggaatagatattccttcagggactatgagtggggaaacaacaccaagccaaggcacatcacccttgcatttgcttcacaagtacaagccaagccacacagacacagatagtgttctttattctccacgatcataccaatctgacactgacttgtccgagacagagggatcttcacaccaattgaatgaaataacacaaacgcgtcaagcttcaagaaatggagaaactcataatatcgatttttcctttgtgaagccttaa

SEQ ID NO: 184 - DNA, 1005 bp, Glycine max
atggatcaattacgtaataatgtgaatgctaggtcgttgcccggaagcaacgcgctgtatggctcgagtacagtgtcaaaagagcaagggccgctgcatcgccgcccggatgtagtgaaaagtaagcaagggttcccacattttcgtgaacgggtgtgggtaaagaaactagttcatgacaggaggattcgctttggtacatggaatataggcacacttactggaaaatctatggaaatagtggatgttatggtgaggaggaagatcaattttatgtgcctacaagaaactaagtggacaggtgaaaaagcgaaagaattagacaactcgggatttaagctgtggtatacgggaaaaatcagatcaagaaatggggtagggattattgtggacaaggagtggaagaaggatgtcgtggatgtaagaagagtaggagatcgtatcatagtcttaaaattagtagtgggacaggacacctttaatgttattaaacactttaaggtaaaattttgggaggatctagaaggggtacttcaggatataccccaaggagagaaagttttcctaggaggggatctcaatggacatgtaggtagcgtggctagaggttttgagggggtgcatgggggttttggcctaggggagatgaatggggagggtaaatccatcttggagttttcggaggctttggatctttctatagccaatacatggtttaagaaaagagaggaacatcttatcacttacaaaagtggagggacatgttctcagatagatttcttccttatcaggaagtctgataggaagtattgcttgaactgtaaagttatcccgggagagagcttgactacccaacatagagttttggttatggatgtaagaattagagatagggcaaagagaagaagtcctctgacgttgggtgaatctagaggttttggacctaggggtaaagaatcgtggtggtggaatgacaatgttcagagcaaagttagaaaattctga

SEQ ID NO: 185 - DNA, 1878 bp, Glycine max
atgtcgatgtcatctctagttagaagacgctcaagcgacgaaataacgaactcggcctcggtttccagtagcctctttccagcatttggcaccaccatctttgatattgaaggttactcgaagtcgaacctaagaaaatatgtcattgctccctatgaccgtagatatcaattgtggcaaacgttcctagtagcattggtagtgtactctgcatgggcatctccattcgagctagctttcagagaactgctagttgggtcgctgttgcccgttgatctccttgtcgatgccttctttgccgttgatataatccttactttttttgtggcttacttggatacatcaacctatctcctcgttgacgaccataagaagattgctctcaggtacgtcaaaaagttacacttcaccatggatgtagcctccactgttccatttgagcagatacaccaaattttgacgggcaaaccaaccaaaagcgaggtctccggtttcctaattatgcttagactatggcgattgaggcgtgttagcgaactcttcgcaaggctagaaaaagacatacgaatcaactactcagcaacaagattttgcaaacttatttgcgttacgctatttgcaatgcacttcgcaggctgcatgtatttttggttggctgtccagcacaaaacacccaaaaacacatggatcggaaacaaaacagaggattttaatgatttgagcgtcgggttgggttacacttattccatgtactggtctgttgcaacccttaccactgttggctatggagatttctatgcagtgaatttaacggagaagcttttcagtactatatacatgctgtttaacatcggcctcacttcatatataatcggaaacatgacaaatctgttggttcatagctctgtccgaaactttgtcatgagggatgctttcaacaaaatattacaatatgcaaacaaatatagactcccggaaggcttaaaggagcaaatgttggcacacatgcaattgaaatttcagactgcagagttacagcaagaagtgttgcaagacctacctaaaacaataagatccagcattgctcggcatcttttccaaaacatagttgaaacaacatatttatttaaaggagtctctgatgattttatcacccagctggtgtcagaaacgaaagcagaatactacccatctaaggttgacattatcttgcaaaatgagatgccaacatatttctacattttggtatctgggtcactggatgtgttgatatacaagaatgggtccgaacagtttttgttcaaacttgaatctggaggcatggcaggagaaataggcgtgatgtttaatattccacaaccttttacagtgagaagtagaggactctcccaggtcatacgaatcaatcatcaccatttcaagcagatggtgcaaccatttagtgatgatgggaagacaatcatctacaactttattaagtattttaagggcctcaaaggcaaggtgctagaagaaatatatgtaacagaattgctgggtgactttcatgacgagcatttaacgcgaaatgagggtacagacgaagaagtttcaagatatcaagaagctccatatgcagaaggaagaacaggaaattccaaagcactgtcaaacccagtccccgtaagagttaaaatccacggacaccatcccaatgaacacaaaatgggaaacgaaacaacaccaaagctcatacttctcccaaattcggtagaagatcttttcagcgttgcagagaaaaaatttggaaacagaggaagcaaaattcttatggctgacggctcagaagtagaagaactaagcacgataagggagaatgacgagttatatatcctctaa

SEQ ID NO: 186 - DNA, 2736 bp, Glycine max
gtagatataaaaggatcggcgttcacgtcagtaatatgatcttaagattagacaatatcacaagatgccacgataatacacaaaaacgtgaacgaacaaacaaaccatgtactcgtagctagcttgtgtgaaatctgtgtccaattcaccatagtgtggaaatggctccaaggttgtacttttccaattggtggaccaaggatacactgaagggaacaccagtggtggtgaaaatggagaaccccactttctctgttgtggagatcaatggtgctgatgctgcattcaggccagtggagaaaagccgcggcaagaatgccaaacaagtcacgtgggtgttgcttctcagggctcaccgtgctgttggctgtgtcacttggcttgccactgttctttgggcgttgctcggagccattaagaagaggttgattcatggacaaggtgtgtctgtggagagtgagagtgacaagttggaaaagggcaagttgctgtttagagtcattagagtgttccttgtgacttccttggcggttttggcctttgaggttgttgcttaccttcaaggttggcattttggaaaccccactttgcacattcctcgtacctctgatttggagggcctgctccacttggcttatgttgcttggctaacgtttcgtgccgagtacattgctcctcctatacaggcactttccaagttttgtgttgttttgtttcttatccagtctgtggatcgcatgctcctttgcttggggtgcttttggatcaaatacaggaaggttaagccaaggattgaaggggatccgttcaagagtgatgatgttgaaggatctgcaagcaattatcccatggttctggttcaaattccaatgtgcaatgagagggaggtgtatgatcaatccatttctgcagtctgtggcattgattggccaagggatcgtttactgattcaagtacttgatgattctgatgatgagagcatacagtggttaattaaagcagaggtctctaaatggagccaaaagggtatcaatataatctataggcatcgcttagtcaggactggatataaagcaggaaatcttaactctgcaatgagctgtgactatgtgaaagactatgagtttgtggcaattttcgatgcagactttcaaccaaatcctgattttcttaagcaaactgtgccacatttcaaggacaatcccgaactaggtttggtccaagcaaggtggtcttttgtgaacaaggatgagaatttgttgactcgtctccaaaacattaacttatgcttccattttgaggtagagcagcaggtcaatggggtatttctcaatttttttggtttcaatggaactgctggtgtttggagaatcaaggccctggaagagtccgggggatggttagagaggacaactgtagaagatatggacattgctgtccgagctcatctgaatggttggaaatttatcttcctaaatgatgtaaaggtaccttgtgaagttcctgagtcgtatgaagcttataggaagcagcaacaccgctggcattcaggtcctatgcaactttttaggttgtctcttccagcaattgtgagatctaaggtgtctccatggaagaaagcaaacttaatactgctattttttctgttgaggaaactgatccttcccttttactccttcaccttattttgcataattcttcctctaaccatgtttgtaccagaggcagagcttcctttgtgggtgatctgctatgtgcctgtatttatgtcactccttaatattcttccttctccaaaatcctttcctttcattgttccctacctccttttcgaaaacaccatgtccgtcaccaaattcaatgcaatggtctctggtctcttccaattgggcagctcttatgaatgggttgtcaccaagaaagctggcaggtcatcagagtctgatttactggctgctgcagaaagggaagccaagtcaatagaacaaaagattcatagaggagcttctgatagtgagcttattgagtcaaaccaattgaaggaacacaaagaagcagctcctgcaaaagttaagaaatctaataagatatatacaaaagagctgactttggcattcctccttctcaccgcttctgtcaggagtctgttatctgcacaaggagttcacttctactttctacttttccaaggggtgaccttcctccttgtggggcttgatttgattggagagcagatgagctagttttcattcaaaaaatcataacagatgatgaatagaaaacaacacctactgatttatcagccaagttgcattccagcaacaaaatgaacaatgaagcatagttaaaccctttctttccttctaaaatttgcagtacaggtctagccaacacataattgattgcaagtaccaaaacaaggtttctctgcaatccaactctatatccattttgcattcacacgattcatcccaagtattccttatagggcactgctcattgtacccttacaggtattgaattcttgtttactggtattggaagtgtataaaatcttcagttttcttcattgtgttcttgggattgggagttctgatttcaaatgtctgagtggagtgcatcttgcttgatatgtcatgaatcataggtgccttcatggtagatagggtgtgtaaaccaggatattttttgtacattcattgttaactaatctaaacaataaattttatttccctt

SEQ ID NO: 187 - DNA, 612 bp, Glycine max
atggaagccaagctctggaactggaaccctctccttcttcctcctcgtttttcttcactcaaacatgcttttccatcaacaactactcgcctcgtagctcacaattcagtctcagaaaccgttcccattcataaggaaaaggaacaaaccctaccttctgtcaaacctacttactcccccactcctcccaatcgaggccttcgaacccctcacagcgggtaccattttgatgggactactcgcaaattcttcgagggttggtacttcaaagtctccattcccgaacggaagcagagcttttgctttatgtataccgtcgagagtcccctgtttcgtaaaccattgacgcagctcgaactggcccaatacgggcccaggtttactggtgtcggggcccaaattctcggtgctgatgacaaatatgtttgccaacactctccccaatcacattttttctggggaagcaggcatgaactaatgttggggaacacgttcgagcccaaccaaaattctaaacctccaaacaaggaggttcctcctcaggtttttattccatctttcaatcttatatgttggaaaatatcaggggataaacccttaggagatctataa

SEQ ID NO: 188 - DNA, 2118 bp, Glycine max
cagcagtgttgttgaagggattgaagagtaaacataggatccacgatcaactcgattttatacttttgtttctatttctctggaggcagctagctagggtcatactcatggggagcttgaaaggagacagtggacatgccaatggcgaaaatcttaccgaagctcttttgccaacacgagatgcacaacaacaacatcaaacagacgacgaggaacaaagatttggtgacaagctctggcttgaaaccaggaagttatggctcattgtggggccctctatattcagccgcctcgcgtcgttcaccatgaatgttgtcacccaagccttcgccggtcacttgggtgatgtcgaactcgctgccatttctatcgccaacaacgttcttgttggcttcaatttcggcctccttttggggatggcgagcgcgttggagacactgtgcgggcaagcgtttggggcgaagagataccacttgttggggatatacatgcagaggtcatggattgttctgttcatgtgctgtttcctgctgttgccgttttatgtttttgcaacgccgcttctgaaattcctaggacagccagatgacgtggcagagtggagcggggtggtggcagtgtggctcattcccctgcacttcagtttcgcgtttcagtttcctatgcagagattcctacagtgccagctcaagacagcagttattgcttgggtttctctgctgggtttggtggttaatgtggtcacaagctggctcttcatttatgtctgggattttggactttatggcgcagctatttctttggacatttcttggtgggttttggtttttggcatgtatgcttacattgcctatggtggctgccctttgacttggaatggtttctcccttgaagctttttctggactctgggaattcctcacactctcttccgcttctggggtcatgttatgcttagagaactggtactacaagatattgctacttatgactggccagttggagaatgccactatcgctgtcgatgccttgtctgtatgtatgaccatcaacgggtgggaaatgatgattcccctggctttcttcgcgggtactggggtaagggtggcgaacgagttaggcgcaggaaatggcaaagcagcaaaatttgcaacgcaagtatcagtggcacaatcaacaatcattgggcttatattttgcgttctgataatgatattccatgagcatatagcatacatattcaccaccagcacttccgtcctacaagccgttgacaacatgtcattactcttagctatcaccattcttctcaacagtgtacaacccgttttgtcaggagtggctgttggatccggatggcaagcatacgttgcatatataaatataggatgctactaccttatcgggttcccactcggaattataatgggatgggtcttcaaaagtggtgtaattggcatttgggggggcatgatttttggtggcacagcaattcaaacgctgatactgatcatagtaacgatacgatgtgattgggaaaaggaggaggagaaagcttgctttcgtgtaagtaagtggtcaaaatctaactccaatggcaatctggaagcctccaattaacatttgatttagccaatggatcgtgtttgttattcaccaatctggattctatgagttttgccgttgtattggatgctgcatatatatatatttctttcaatattcaccaagttgttgttgtattcaaaattaaaggcccggttattctttaggatagctatgttatattaccatgagttgaatttggagatccccacgcaccgacaatacagttgtaattccaacctatggtgttactacatattctttagattgtggagacggataagatgagagaaaagtgatgaagctcgtgatttaccctgtcatcattaatttctttgattccttgttttcttatcttttattgctggctaacaactagctggacaaggtttctttgttattaaagtgagtggatcattttttttttctttaagtgttgcgtggatggaaattagttgagacaggaaataagttctatacataatactataacagtaacggagtgattatgtgc

SEQ ID NO: 189 - DNA, 1756 bp, Glycine max
gcagagaagaagagacagtgaggccacacacttacactcgtagagagagatagtaacgcagctgtcacaaatcccttgtctttcttccttctctttttttggccagcaaattaggctgtcagatctctctctctcactcacatcttttaataaaaataataaatttgtttcctttccttatatatttttgttgcaatcataatcaaccaacacctctgtttcaaacaaccatcaaataataaccataatacaccatcataaaccatacctaccctcttcaaatgcaatgattccactgctgccaatcgcacatatatagtacagagcagagacattttatggaattttggccaaggcaaacaaagtgaagaaagagcttaaatgagtgagacagcgactcttcatgcacaaacaaggacacccatttcttctttggattcaatggctcatcaccacccgcattatcggtcacccttcggagacacaacgttcaccaaattgttcgttggaggactagcttgggagactcccaccgaagaaatgcgcaaatatttcgagcagttcggtaacattcttgaagctgtcatcatcactgacaagaacaccggaaaatccaaaggctatggattcgtaacattctgtgatcaagaatcagctagaagggcatgtgctgatccaaacccaataatagatggaagaagagcaaattgtaatattgcttctcttggaaggactagactatcaccacctagagggaggaatgtagttcaaggtggaggaggaacagcacagggtgttccgggagtgggactgccaccgtcgctgcccccgccaccacctgttctgtacccaccatatggctatacaacctacactcctgattatgggtaccaccaaattcagcaaccacaatactatcaacaactttatggagcatcatcttctaccatgagcaccccatattactatggttattctgtgcaagcaccaagaaacgcattttcttcaccccaagcaaatcgcctatcacctggaccatcctatctatactaccctacaccaatggaagtctcattctctggatatcgtccaccccaacaaacaccaatgaggcaaacctttgcttcccctaatgattcacagagtcagcagcgtacctcctctgaaacagcagccggggtagctataacatcagaaagatcgaatacccaagggaagaactaataaatatatatacctgctaagtttcaactgtttaatcttcaagtcacattaattcttcatctttttcctcattatattataatttttttagtccacaagcttttgctttaggaaataatggttcagttagctgattaccgatgttctccacagctatggcattttcaaaagatggactcatcaacttcttcattcacaatattatcattctcttctccttttctttagggattttcacttttatatctaagattatacccactcacacatgtagtacgtgtttaattagtaaaagtgtgacaagtaatatgaataaatgccctctataaaaatccattattaagattaacttatcacggtacagcactcttgcctaacaagcgcacataaaatcagacctatgttcatactagaatatcaatcagctatcagtttggtgaacccaactattcatgttgtacctagttttgccttgggttttgtttggtcccctaagtgttttgttattttgttattgttaactcattgataa

SEQ ID NO: 190 - DNA, 2043 bp, Glycine max
gataagaatgggcctgaggtccagtggaaaaataagattgatgatagatagacatacatagagtagcatcaaccagacagaaaccgaaactagaacggaaaatggctgctttccgcggcgtgcttcgtcacatacacataagcacgttcagctgcttcactccaccgccgcgcatacctactatggcgttgttttcaagtcagggtgccatgtggcactgtcttattccctccaaagcctccagaacagtaaaatcccgcgccggttcagagaactacaataacttagtgttgaagaaagacgagcgcttaggtgctggagagtgtgtcggcgaggttggaagtgggaccacgattgcggccatcgtaacttccgtggggggcccacctgctgccgttggaatcgttcgactttctggcccgggcgcggtgtccattgcgggccgagtgtttcggcccgcccggaagacgtggcggcccactagccacgttgtcgaatacggcgtcgtcttggactccgacggcaacgtcatcgatgaggttttggcggttccgatgctggcaccgaggtcctacacgcgcgaagacgtggtcgagcttcagtgccacgggagcgaagtgtgtctgcgccgcgtgcttaggacttgtttggaagccggagcaacactcgctcaaccaggcgagtttactcttcgcgcttttcttaacggtcgtttggatctctcccaagccgaaaacgttgcaagattaattgccgcgaaatccgtggctgctgcagatgctgcactggaaggaatccagggtggtttctcttctcttgtcagatcattgaggagtcagtgcattgagttgctcactgagattgaagctcgtttggattttgatgatgagatgccgcccctggatttgaatctgattatggataaaatccataacatgtcacgagaggtggagaatgcgttggaaacggcaaattatgacaagcttctgcaatctggattgcagatagcaattgttgggcgcccaaatgttggcaagtcaagccttcttaatgcatggagcaaaagtgagagggcaatagttactgaaattgctggaaccactcgtgatgtgattgaagcaagtatcagtgttagtggcattcctataacacttcttgataccgccggcatcagggacactgatgacattgtggaaaagattggcgtagagcgatctgaagcagttgctaggggtgctgatttaattatcatgactatgagtgctgttgaagggtggacatctgaagacaccaaacttcttgaaaggattcaatctactaaggtggacagaggtggtaccaattacacggattttaaaaccaagtctccagaaagggatcaactggatcatccaccccagtcatccttgtggtaaacaagatagactgtaaaccttgtgctgagactgaatgggacaaaggatgtcagaatcatattttcagtaaacatgtgtttacatgtgctgttactggtcaaggattgcatgacttagagggggcagtattacagattgtgggtcttgaaggcattcctgctgggggtcgcaggtggactgtcaatcagagacaatgtgaacaacttgttcggaccaaggaagcacttgtaaggttacaatcatccataaaggacgaactgcctctggatttttggacaattgatttgagggatgctgcattgtcccttggacagataagtggagaagatatatcggaggaggttttatcaaatatatttggcaagttctgtattggtaaatagaaggggtccaaatatgtgcttggtgatttttagctagttttctttacaccatttcatcaatcatgtataggacgccaaattcaatgagtcagtatatctcccttggatttaaaagccattgtgatcagttgttgtatatttctcatacttattatcacatgaattgttaaattaattttgagagtacaactgcaaataaagtgatattcagtaggctaatccaccgaagcaagtttttaattcgt

SEQ ID NO: 191 - DNA, 324 bp, Glycine max
atgactccatcgttttcggccggctttgtcaccttcttaaagctcaattcagatcactgctaccatttcttctttctggaatcacttaatccatgggtgacaatgatggtcatgatcccttatcaagcaaccttgttatcctcctcattgccgtgccgcagctttcgttgtctcaatctaccatgtcatagctatgtgctggttcaaccagcgcatcgcaaaccgaaacccacaacaacaacggccaccacagacagagggcacttccttggtgtcggtggcgcacatgattccaacccacacatatcacaagaagaaaattga

SEQ ID NO: 192 - DNA, 808 bp, Glycine max
aaaggcaaaaacctcaatcagaaggcaataaataatagcgaagctcttacattcaccgtcaaatgaattaacatatgactccatcgttttcggccggctttgtcaccttcttaaagctcaattcagatcactgctaccatttcttctttctggaatcacttaatccatgggtgacaatgatggtcatgatcccttatcaagcaaccttgttatcctcctcattgccgtgccgcagctttcgttgtctcaatctaccatgtcatagctatgtgctggttcaaccagcgcatcgcaaaccgaaacccacaacaacaacggccaccacagacagagggcacttccttggtgtcggtggcgcacatgattccaacccacacatatcacaagaagaaaattgatcgtgcggttcaagccgacccaatagaattaatgaagcattgagcttgaatccagaattgggcttggacttgaagaaggcagactattttattctacaaaattttatcttatctagactttatcttatttagatattatttagatttgatctcatctagatattatttcatctagatcttatcttatcttatcttatctagattttattttattttatttatgggcttggatttaaaatagatttgtaagctttggggctggaaaactatataacagcaccaaggttctagtttaggcttctctcctcccttctattctctctctcctgttttcgtttttagttttaggcctctattctctttctccttttttttcgtttttgcaattccaattatgacttttcatttta

SEQ ID NO: 193 - DNA, 1835 bp, Glycine max
cttttcgcttctctgactcacttctctgtgtgctagaaagagaaagtaagagagaagagagagaaagagagggaaagggagagaaaatcatagaagtccagattcaatgcctgctgttaaaatgaaggctaaggcaattgcaacctgcaaaaaagatgggagctatcctcatgtgtctcagaattcaaataaaatatctaaatccaccgttgttagagtaactaatgaattggtaaatttagctatctccagccaaacatctcaaaatgatttttgcaaaaatgaagaatattctatggatcttgacaataaaggagacatgggccagccctctctttcattcaatggatgtacagattcaatggagcagactgatatttcattcaatggatgtacagattcagtagtagcaagggattctttgtcatcttctctttccccagattcagaagcaattttgccttataatgggcttaattatgcccattgtcagcaatttgaaacagttaatagggaacagttcacatgggaacctcagctggatgacaatttcttcagcactttccaaatgtttgaccttgactctgcatatgaaactgggtttcccattgatgggctaactttatttgatgacagccaaagctattataacctttctgatcttctatttcctgggacaaattttaccatccatggcactgaggaaaatatggagtatcccactctcaaggagacaataggagcagcagattttacttttggaggatcctctatagggtttcaacagacgtctgattcttcatgggttaatcatctcatgtgccatcaggccattccattcactgaagaactttctgtcatctccagtgagatttcttcagacagagtagattattgggatcaagagacattcattaagggggttttagagttagcagatgatgctaactcattgcctgcattactcatcaatgaaacaagcaaaaggaagaaggttacccttgtccttgatttggatgaaacgctgatccattcttccatggggcaatgcgatggtgcggctgacttcacatttaagatgatcacagacagggagttgactgtatatgtacgaaagaggccctttctccaagaatttttggtgaaagtatcggagatgtttgaaatcatcattttcacagctagtaaacgcatgtatgctgaaacattgcttgatgttcttgatcctgataaaaagtttttttctcgacgagtgtaccgagaatcatgcacctggaaagatcgccgctgcgtcaaggatttgacagttcttggaattgacctggcaaaagtatgcataatcgacaacactccagaggtattcaggtttcaagttaacaatgggattcctatcaaaagttggtttgacgaccccactgactctgctttgatgtctttgctcccctttcttgagaaactggttgatgtggatgatgttcgcccccttattgcagagaaatttggggcaaggacttaattttgcacttgtggtcgccttgcccttcttggaagcagtagataacttaatcttaggattctagatctcctttcgataaccctacctacccaattttcatagaagagaatgttacctagttagggttttttttttttagttacatagatgtagttctttttaaacattttatttgagtttttggtgaatatatattatttacaaatggctatgattctattgtagccaaatagcatatatatatatatataaggaaaaaaaatgtacataaacagtgctataatttaagttttggcttttgttaatgcatgcagttagt

SEQ ID NO: 194 - DNA, 3088 bp, Glycine max
ttagctacttgctttcccaacaaaaggctgcttggctttggaattgaaaattggaagcagacatgtcctttctgtaaatccaactaattctatcaaattctatttctcataaattctcaaattaccatattccacttcttctcccgtaggtcatatccttcaattcctacacttgttacacaatttcttgaattggatttggagccaacccttcacattttcaggtatccatttcccagatcttcatcaatcaatcattttggtttttctttcgcttccccactcccaattacattgccctcaaaccctggatcttgcggaagcctgtaatttgctaaccaaagtaacacgaagtagttaagcagggttgtgcttgggttgtagcataaatttcttgcacttttagcgttttagaataaaacccaattctcaaaattcgaccttttcatttgggtctctcagaaattaagcctggttagccaatgaatgtgacgatgctgcttttgtagtatgaagctagggttgttgtatgcaattgttgtgttagttttttggaagatatgagtaggtttccttcgttttcagtgagaacagaagtgagtccgagtgttgattcagaatcattgcaacgatgggttgttgccttttgtgctataaggtttgatcttgaacagggccagcttgtagaagagtgttatccacaggggtgtttttcccatgatgaggagcttgaaattgcttatagttcctttcctgattccgtttcacagcaccaaaaccaaaaccgatccagcattcacgattgtatcttcttttaccgaattcacaggcaccttaagaagtccctagatgaaaagggtgtcgctgatagtagcaatgcttctaaattcttgtatggttatgtgtttaataggcagagacacgatgagcggttaaagcgtggtggggagcagaagtccgtggtcattttgtcttatagtccttattcaagtgtgtttagacctttgttgcaaattgtaggtcctttgttttttgacattggtaagaaagcattggagcatattgctgcttatgtttcaaaatggcctgctccccttcctggtaaggtgatggatcttcctattggaaatgcaacccttaaagtgaacttgccacctgctcacggtttgcctgtagaaggtgaattgtcttttgaagagggtgcttcttctgtggcaccttttgttcctaatagtcagccagtcccacaaggtctttttcatgattcagatatttttggatcgttccgagggattctattgcagctttggctgttgtgggagttgttgctcattggtgaaccgatgctcatcattgcccccacacctccccaatgttgtgaggctgtagctagtcttgtgagtttggttgctccattactttgcagtgttgatttccgtccctattttaccattcatgacccagtgtttgcacgtttaaactcaatccaagaaggccaagctttccccccgatgattttaggggtgacaaacgtgttcttcctcaaagcactgcgtaacatcccacacattgtctcagttggaagtcctcctcttaattcgaacaggcttgcccttacaactaggtcttctactggcagaggttctggcagaccagaaggtcttgggtttcaacaactttccctaaagaagttctctccttctagtttattgagtgcggttaggctgcggagagatggccctctatgtctcatgacagaacataaggaagccatttggagtatatattctgcgacaactaagccagatacttctatcttaaataggcttatagatgctggggtgtcaccaagagttgaagagtcaatgtcagttgtgaataatgagatattacggagacacttcttggagctcacaacaaactttttggctccttttagcccatactttaggacttcaacaccattagaaggatcttctccttatgtagatcctccttctctacctccattcaatgccgatgaatttcttgcaagtttatcagcaagaggtccagggaagtttatattaaagcgaatgaaatctaactggcttgacttatacagagaaggcgtgctgttgcggaacaagaacaagatagattatggagacaagcaagaatgaaaaccgacatacaacaacttatttctagactatctgaattggaaattgtggactccttcaatgtcatagagagacttctcctcagagaaatacagctgcagcaatctggaaagagtggcattgattctgtggctacctctcagaaactaaagggagaccttagggccattttcaatgttctttcaaaggacatgcaacaactcatgctttcaaaccctgaaagggcgtcccttctgcaaccaagtccagagtcaccaaaacttccagggcgtccgctcatacaagttgcggttgggtcttctacatcaccccggtaacggtaaaaacaggaaaccggtggttgaggtatataggatctccttgtgcttctgaaggacaaatgaattcttggactacttccatctgattgagagaagttctctgattcatgacaactaatgtggggtaagactctttggtgcacatcttaaaagcttttcaagtcacttatttgctgattcttcaaataaacagctgcacggtaaacagcaatttgtgttgatcaatacacttcaagcatccggtgtggcgtataacttctctctcggcaaatgtatatggaaagtccttttggtgttaaatttatgaggtttttcttattgccttttttttggcagaaattgaggcttcgtgttgtttatggtctgaaaagatcaagctgtaaattattaactgtattagctttcggtagtggtctctcccaaatggtttacaattccatattttttacaatgcttgtctttgaggcccaaattcatttacattgtattttatctagactcattaatattttacgggagaaatgctaccaacacatgtaacattctttattattggtcgatatttgttggatattgttcaacaatctttttattgtgtttgtttat

SEQ ID NO: 195 - DNA, 2404 bp, Glycine max
cttaagaaaactcttttatgcagtccgagactctttccctctttcatcgccgtcccctctcttcatcaaaataacaaaaacaccctcgccggaaaactattctctgacgactggccgttctccctccctccatctccggcgaccggttttcctcctttgatttcggcagaatcatttacagcacggaaaaggatctcctttctagataatttggtgaaggcgggacacatgattggcaaggctgctgaatcttgttagcttgatgaaatttccaatcaatgtcgtctgttaattagggtgaatggatgtatgtgaatcagggaagaacaaagctccagagaccccaagagtaagaccaccctcggttctggcagaaaagaacaatgcagaaaagaccaccagacgctcaagaacaagggaaattagttctagatacaaatcccctactcctgctagcccttctgctcctcgtagatgcccttcaccaaaccttacaagaacaacgcctgcgtcatcctctcacttgtttccaaagaggtctctctccacagaaaggaagaggccctcaactccgacttccccaacgccacaaagaccttctacgcctgtatctgttgatgggaaattgtcatccagaagactatcgggtacccgtttgccggacagtctatggccttccactatgcgaagtctgagtgtttctttccagtcagataccatttccatacctgttagcaagaaagagaagcccgttgttagtgcttcagaccgcactctgcgcccggcttcaaatgtggcacacaagcagcctgaaactccaaccataagaaagcctacgccagagagaaagaaaagtccccttaaagggaagaatgcttctgatcagtctgagaattcaaaaccacttgatagcttgtcttctcggttaatagatcagcatcggtggccaaatagaataggtgggaaggtatcttctaatgcattaaacagaagtgttgattgtgctgatatcagaacgttgaacacttcagttccgggaactggtgtttcttcactgagaagattgtcattgtctatatcaggtgaatccagtaaacccttccaaagggcttctaatgacgctgtaaggctattgtcgcttgttggaagtggcagaataggaagtgaggtgaaatcagttgatgactgtttgccacaagaactaagacctcacaaatcttttgctgcaactccaaccgataaagcaggacttgcatttgctggagtcagatctcagtccttgtttgctcctggatcacgactgccctcacctagtaggacctcagtgctatcctcttctagttcaagaggtgtcagtccatctaggtcaagaccatcaactcctccttctaggggggttagtccatctcgaattagaccaaccaattcatccattcaatcaaacaattcaatttcagtgctcagctttattgctgattttaaaaaagggaaaaagggtgcagcctacatagaagatgctcaccaattacgtcttctctacaacagatacttgcaatggaggtttgtcaatgcaagagctgaggctgtactttatatccaaaatgcaattgtggagaaaactctatataatgtatggattactactttgtccctgtgggagtctgttattaggaagaggatcaatcttcagcagctgaagctcgaacttaagctgaactctgttatgaatgatcaaatgacttaccttgatgattgggctgtacttgaaagagatcatattgatgctgtatctaaggctgtggaagacttggaggccagcactcttcgtcttcctgtaactggaggagcaatgtcagatattgagcatttgaaggttgctatctgtcaagctgttgatgttatgcaagcaatggcatctgcaatctgctctttgctctcgcaggttgagggcatgaacaatttaatttctgaagttgctgccatagcagtgcaagaaaagaccatgcttgatgaatgtgaaatgctactggcttcagtagcagctatgcaggttgaggaaagtagccttcggacgcatcttatgcaaatcatgcaagctttggggatgagcaagtaatcaatttcgaaaatttaaacaagcacgaaccacacctgccggcaagctaacaagtaataacttatctcttgcggcttcagccttagtatccatcagtatctaatatctttcaggttaattaggcaagttttggaaagttctgttttcaccttctcgctaagccaatctactggcttagcgagcgtccgctaagcgcaacactcctgggctaaccgcgaggatgaatccagaagaagatgagttgtacaggtttgctaagcgcaccgcttcatctcactaagcgcaccg

SEQ ID NO: 196 - DNA, 3522 bp, Glycine max
agaagagagagaaatagagagaaagggagacaagttatggtaacaactttaatatccattttgatgtaatgtaaatttcatgttgttgttttgtgggttttcattttgggggtctttcctctttgtttctctctctctctgagaaagcaaaatcttcattgagagaatggcccagcactgcggatccaaatccccattcttttctgcttttctaaggcatctcacaaagcaaaatatcactttttgattcccgagctcttctgggtctctctctctctctctctctctctctctctctctctctcttctcttcaactttcattcatcaatgcctttcttctccttcttcttctgcaaacaatgactcatccggtgagtgagtgagttttcattcccttagaaatgaggatactttattatatcttgtttaattgaaacctgtgcattatcatctatggcattattgggcacgagtgcaaacagacaatgcaatgtctatttcccaggatatcattgcccgagggattttgtctttggcactgaaggcagcccatggacctcatctaatggtaacagtgaacgtgagaatgactgttaccgacttggttccttgccattgtcatcaccttgtcatatttcaggacacaacaaggaacttctgaaacaaacaatactcaagcatgaagcgatatttagggaccaaattcaagagcttcaccgcatttaccagaaacaaagggagttaatggatgaaattaaaaggattgagttccataaacacagtttaaggatggagatatcatcttcaagttcctctttgtattactcacaaaacatgccttggttgactagtcaatcatctgttttaaatcctgaacgcatccagttaccattggcttctatgcaagaaaagagcagggaattatctcctactcctcttcctgctccaactgcgatcaaagaatctttagatcctaaactgtcagggttgacttacagaaaagttggtaagaaaatactggatcttcaacttccagctgatgagtacattgacagtgaaggtgattcttgtgagaatgaaagggttatcaaacagcccccactgtcaacttatactgttgagaaaccatatagaatcaattctaataatggttttgccgacttaaatttaccatgtaagcttcaaaaagagacaggtgtgaagtctgatgattttggggcctcaatccctcacagaaaccatacatttcatgatatgcccgggagaatgacaccaggctctcataattttcccaatgatgtcatcctgaatttgaaaagaaaacaggatcatgaagcttacccagatctcccactatcaaatcacgggcagaaacatggatggctgccctcgggcacttgtgctgggcacaatggcagtgacttgggttttcttgctaaatttaatgatatggaaagccaatctgtttcaattgattctgtaagtaagaagctgaaacaagttaagtattgtccatgttttcattcaatacatcaaattgtcccaagatctagaaccgagagccctgcaggaactcatgatcctactagtggtggctggcttcgaccaagctttgcttcatgcacatgtgctcctcataagcttgtttctgattctgatatgaaaaattctggtatttcaccatcagtgttatggaaaagtaccacatctgaccctaatttagatcttcaacactatcttcttaaccaaagtttttgcagcaggtccaacatattggatctaccatcaattagtactggtgatctaaacagcattgacaactttggttcatcatcagctgaccatgagcttaggaagtatgttaaggatttggtatatgtggggactcacaagagcataaacctgaatattatgcctgctggttgttcggataaaacagctgcagcatttcaaagtgatcagattacaggtgaagaagataaatgtcaggattcacgattgtcttggctgaaagcaaagcctgtagctaaaggaaagcccaatgaagaaagtcaactctcaacccaagttgactccttccttttgaatccttataaatctggttgtatacattctgatttgatgttcaataaggttgagaaaagtgactcgtgtacagaaaagactctggcatttgaccttaatggaaagcctcagacatccaaagtcttccagagcctgtccaagaatcattggattgaagaaattaagaagatatccaatataaattcagcttgtgatagtgatcctgatatgggggaacaggcacctgctagtgaacgtttcacgaagaatgagaagaaacacaagcatttggaaggtatttttgacctaaattcaggcatgaacgaggatgagaatatgccaattgatattgatttacaagcacctgcaagtccagaaaacaaggaatgttctccacccagaggagaatctgatgaaaaccagcttgagatgcccttgcaaatggaagggcaggagcaggaggatctggaagcacgagaaaagcaaaccaaaattgcagctgaggctttggtttccatatcagaaactgtggcctataatggcctccaaatgacaacttgtccatcatctgaatcttctgtaagtagttctctctactggttttctgaaattgtttctacaatagtggatcattcagagtgtgaggttaaggaggatttcagttgtaccattaaggatcttgaggactttctgcctgctgactttgattactttgagttcatgtccttaaatttgaccgacacaaaggacctagattatggctgctataagagttgtggccaaaatgagcaagaagttgaatctagttcaccaattcaaccaagaaattgccgaacaaacaggaagcggcgtgggaacgactttcaaagtgaaattctcccgagccttgcttctctgtcgcggtacgaggtaactgaagatcttcaaacaatcggaggtctcttggaagctgccagaagaactcattcagcaacaggttgcctaagaagtgcatgcaaaaatgcattggctaaggggaagaaaaggtcttgtgcttctgtctctaataacatcacagacttgctgttgaacttgaaggaagtaaatattgatactgaaattgccattgagaaaatgggattcataagttgggggaagatttgtagaaagccaagggggaagagagttgctaccagtaaaccccacttaatttttagcaaagtacataactaattctaaagttaaagttcatggacttttggataaggtttttttatgaactataggatcgtcttgtatatgtcgtcatagacaattcatagtatatgagagtatgttagaggaatagaaaaggaacccttacttatgtccaatttacttattggaatcaaaacccattctctccttacaggagatgcaatgacttttaattatctctttggtttgttgcattttggatctattgcctccttaaagcc

SEQ ID NO: 197 - DNA, 1937 bp, Glycine max
acaaaattcgtgtttcatatccacctaaaccataagtcctattggctcaaatgcaacatatgcctcataatgccatctcacccttcctccaaaaggtctatatatatctttggtttctctgtgtctcaatatcacattctcatctctaaccactttgcttcagctatggagtttcgttgccttccattggttttctctctcaatctgatcctgatgacagctcatgctgccatacctccagaagtttactgggaaaggatgcttccaaataccccaatgcccaaagcaatcatagactttctaaaccttgatcaacttcctctttggtatggtgctaaggaaacccaatctacagatcaaatattcctgtatgatgctaagaaaacccaatcaacagatcaagttcctcctatcttttatggtgataagaaaacccaatcaacagatgaagttcctcctatcttttatggtgctaagaaaactcaatcaatagatggagttcctcctatcttttatggtgctaagaaaacccaatcaacagatgaagttcctccatacttttatggtgctaagaaaatccaatcaacagatgaagttcctcctatcttttatggtgctaagaaaacccaatcaacagatcaaattcctccttttttttcttatggtgctaagaaaacccaatcaacagatcaaattcctccttttttttcttatggtgctaagaaaacccaatcaacagatcaagttcctccttttttttatggtgctaagaaaacccaatcaacagatcaagttcctatcttttatggtgctaagaaaactcaatcaacagatcaagttcctatcttttatggtgctaagaaaatccaatcaacagatcaaactcctctttttttatatggtgctaagaaaacccaatccgaagatcaagttcctattttttggtacggtattaagaaaactcaatccgaagatcaacctcctctttggtacggtgttaagaaaacctatgttgcaaaaagaagtctttcacaagaagatgaaacgatccttgttgctaatggtcatcaacatgacatcccaaaagcagaccaagttttctttgaagaaggattaaggcctggcacaaaattggatgctcacttcaagaaaagagaaaatgtaaccccattgttgcctcgccaaattgcacaacatataccgttgtcatcagcaaagataaaagaaatagttgagatgctttttgtgaacccagagccagagaatgttaagattctagaggaaaccattagtatgtgtgaagtgcctgcaataactggagaagaaagatattgtgcaacttcattagagtccatggtagattttgtcacttctaagcttgggaagaatgctcgagttatttctacagaagcagaaaaggaaagtaagtcccaaaaattctcggtgaaagatggagtgaagttgttagcagaagataaggtcattgtttgtcatcctatggattacccatatgttgtgtttatgtgtcatgagatatcaaatactactgcgcattttatgcctttggagggagaagatggaaccagagttaaagctgcagctgtatgccacaaagacacatcagaatgggatccaaaccatgtgtttttacaaatgcttaaaaccaagcctggagctgctccagtgtgtcacatcttccctgagggccaccttctctggtttgccaaataggttacttaagtctttatttgttagtgtgtccttaaataagtaggcatttccatattgcatctgatgtactatatcagcctacaatgtatttctctatgtttgaaattgtgatctaccttaatggcatcataatgtagtgattatgttgttgtgatgtattacatatgtattaatgtaaccatgttatgcgacttttcttttcaaaa

SEQ ID NO: 198 - DNA, 1571 bp, Glycine max
gtaagactcagacccagaaacctacggctgaaggcagtgtcacacgtttgattcaaccaacgtgagacccttcttctatccttcgacgccacgcacgctcttgttgtctccttcattcgcaatattgttatggcaaatgccaagttcggttcctccttttcatgttcagcggcttctctttcttcttctcctttccaacgcaccagaactgcccagttgaacttatctcaagggttgtttgtcaaccaactaactggtgctcagttgcaaatgtacactaaagacaaatcatgccagcttaagtttattcatggaatgccaaacttaaaaggaaggctacagaaacagcattatgctctttttgttgtctctgaggatcagtcacaatactgtgagctcgaaacaactgctttagtgctagaaaacagcaatacagttgcagaagacatctctcctgcaagcaactcatattttcatttatcaggtagtgatggaaaaccaggtttactatcattttataaccgtccatacagaagagatagtaagatcctcttaccaaattcagagagaagtcaaaacagcatattgtggtttttgggccctgcagtcctcgttgcgtccttcatttttccttcactctatttacgcaaagtgctatccatcatttttgaggactctttgttaactgatttcctcatattattcttcacagaagcaattttctattgtggtgttggggtattcctttatctactagaccatgtaagaagacccttgctagtggatatcgctgcaaacaatagtgatactctacccccacaattgggacagagagtctcttctgttgctaccctggtgcttagtcttgtaattccaatggtgactatgggtttggtctggccgtggactggccctgcagcctccgcaactcttgctccataccttgttggtatagttgtccaatttgcatttgagcaatatgccagatatcgaaagtctccttcatggtctgctattccattaatctttcaagtgtatagattgcaccaactaaatagagcagcacaactggtgacagctttatcatttactgttagaggagctgaaatgacctcacacaacatggctataaacagctctttgggtacccttctaaatgtcctacaattccttggtgtgatttgcatttggtccctatccagcttcctcatgagatttatcccttatgcttcaacaactaagcagtaaagaatttcttgtaaagtttgttaaccatgtcatctcacacatcagaacacccccagttcatcttcgtgcagaatatgtagatctacatgggtttattttttggtggtttaaaactgttaaatctaattggaattttggacactaatcctctgattcatctagaattaaaaaaaatggtggtttcaagaatttgaaactgaggattttggataccgattaaacaaaggaatatttgtagttttacttgtaaggcatttgtttaaaatgttatttgcacgaaatgaagggaaaacgtggcaattagaccactaaattatatattc

SEQ ID NO: 199 - DNA, 1136 bp, Glycine max
gataataaaattttttttttacagaaataacgagtttgatgaagctgaacctaaacctatctatcagcaccccttacaagtcatcacttggaacaccacaccagttagaacaacctactgggccaggaaaagaggagagcaattattagtattagtatctatttattatatagtttgggttgcagagtttcactttgtgacaaaagtatgtaactatgtttttgttgtaacttgtgtgatatcaagtgaaacagaagcgcaatcatcccaatttgcaaatgccaaaaaacctgagtttggaagaaagaagagaaaaataaaatggcgagcgtgccttcaccttctcctcctccacgctcctccccaaacaaccaggtggaagctgctacaaataatggggcttctcacgtcgatgataaaaaacctaacttcaccgatggtcttgatcacttggacagtccacagtgcattgagaggttcaaaaaatatgatgatgattatgctcatcgtttgctggcaaaatatttctctaacaaaaactttaatggaggcaacatatttgatttggaaataacagtaaatgatgaaatcataaagtcaagcagatcctgtagtaggttttgaagagcaatccagcaatggatcaactccaccagcagattcccaagctaacatccccaatgggaaacatgtggtgaagaactgaaataatgtgccttgagaagcaccaatgcatgacatcatagaaaacttaacgcaaatatagtcataattattaccaggaattctggaacttcgtgaactgaaaagatggtcatggtctcaaccatcaaattccaagcctaaactagatttcccggtcatggtttttctggggttctagttatgaatttaggaccgcaatttatatgatttagtatactgatcgcaaagtgaataatcgccacccactatttgatttttattctgcatttcacattattttctagttgtttgtcttagctggtacgtagtactacagtagtatgaaaaaagtccaaaatataatatcgattggtggggctcttgtatttgtgcttgtttcgatgcaaccgaacatcagaaagaaatcgttacaaatctcatttggcttagct

SEQ ID NO: 200 - DNA, 3852 bp, Glycine max
attgatcaataaaaaaaattatatgttaactatggcatgttactcatcctgatgagtgagcgtctgagtgatgaaggatacaatgcttaattttttattttttatgagtggggcaaggcggggagagcttttttggagttaagtgacattgatatggaaaatgagttgcaccaacccagctgagtttgttgctttaaaggaatgaaagagaaataattaatagaattttctcagtaaatgagctgtttgatttgtaatgattgttatgatatgttttgttatgattgttgtgatgtgatggagtgtgtttaacggtctttttgctgtatttgacaaagttgagtgggattagggcaatttgacctgggaagatatttattgtgcaactcttgtacatcaaccatcttctattgtttctatttttttaaaatttgttgttcacttgtgttatcttgtaataccagtccacacacaacctgcttttgttttgtctttctatcttcttttctacctgttgcctttttatttttggagttggctgatatgctccataaactgggatagtttataccaacatgtgtgcgtgggtcattacgacacatgaatccatatcagaatgggctagcattggaagagaaaagctgtaaagaagcagcgaatctgtttggagaaaccaagcatattctactgtcaaatttttcatcaatgggaaacggaacgtctgaagaagcagagaggtattggtttgcttttattttgtactctgtcaaaaaattgatccagaaaaatgacgagggtgagaaggaagacactgagaacattgggcttagcttgtgtcgtatattgagagcagcaaagcttaacattgcagattttttcaaagaacttccacagtttgttgttaaggctggtccaactttaagtaatctatatggcacagattgggaaaacaggcttgaggcgaaggagatgcatgccaatgctattcacttgaagattcttagcaagtactataaacgtgtatttggagagttctttgtggcaactgacacaaatgctgaaataaactcacctattactgttcatgcatctgaatatcatcgatttggatggttgcttttcctggcacttcgtgtacatgctttcagccgtttcaaagacttagtgacttgcactaatggtttaatttcaatcttggccatcttaattattcatgttcctactcgattttggaatttcaacattcatgactcctcacgctttgttaagaaaagtaacaaaggtgtggacctccttgcatcactttgcaacatatacaacacttctgaagatgagttgaggaaaaccatggagaaagccaataatgtaatagcagatatattgaagaagcagccttgcttggcatctgaatgtgaaaccggaaacctagagaatattgataaagatggtttgacctattttaaagacctgatggaagaatcgtctctaccttctagtttaagtatgttagaaaaagattatgattacatgattcacaacaagagtgaattggatgaaaggttattcattaatgaggatgacagcctattagcttcagtaagcttatctggaggttctgtttcagctggtggtgtaaagaggaaatttgattcaatggcatcacctgctaagaccattacaagtcctctctcaccacaccgctcccccgcatcacatgctaatggcatcccaggtagtgcaaactcaaagatggcggccacccctgtaagcacagcaatgactacagcgaagtggcttcgaactgtcatttctccacttccatcaaagccctcgccagagctggaacggtttttgacatcatgtgatagggatgctacgagtgatgtggttcgcagagcacagattatattgcaggctatatttcctagtagtcctctcggagaacgatgtgtaactggaagcctgcaaagtgcaaacgttgtggacaatatatgggctgaacaacgaagactggaagcactgaagttatactacagggtattggaagcaatgtgcagagcagaagcccaagtacttcatgcaactaatttaacctctctacttaccaatgagaggttccatcggtgtatgcttgcatgttctgcagagttagtcctggcaactcacaagactgtaacaatgttgttccctgcagtactagagaggactggaattacagcctttgatcttagcaaggtgattgaaagtttcattagacatgaagaatctctcccaagagaattgagaagacatctgaattcattggaagaacgtcttttggagagcatggtatgggaaaagggttcttcaatgcataactctttggcagttgccagaccttccctctctgcagagataaatagtcttggactgttagctgaaccaatgccatcattggatgaaattgcaatgcatattaacttctcttgtggaggactgccgccagtgcctaccttgcccaagcttgaaagcccttcaaatcagaatggggatatcagatcacccaagcgaaatgttttaatggaaagaaattctttcacttcaccagtgaaagattgccttcttccctgtatcatccttaagtcaaaactacccccacctcctttgcagtcagcatttgccagcccaacaaagcccaatccaggaggtggaggggaaacatgtgcagaaactgggatcaacattttttttggcaagatcatcaagttgggagcagtcagaataagtggcatggttgaaaggctacaattatctcagcaaataagggagaatgtatactctcttttccagcggatccttaatcagtggacatctctctttttcaaccgtcatattgaccaaatcatcttgtgttgtttctatggagttgcaaagatttcacaactcaatctaacttttaaggagatcgtatacaactacagaaagcaaccacattgcaaaccacaagtttttcgtagtgtatttgttgattggtcattggctcgccgaaatgggagaacaggacaggagcatattgacataattaccttttacaatgaaatattcattccttctgtaaagccactgcttgttgaacttggccctgctggaccaactacaaaaagcgaccgaatacctgaagttaataaaaatgatggccatttagctcaatgtccagggtctcctaaaatatcacctttcccaacccttcctgatatgtctccaaaaaaagtgtcagccacacataacgtatatgtctctccattacgatcgtccaagatggaggctctaatatcacacagctcaaaaagctattatgcatgtgttggggagagcactcatgcatatcagagcccgtcaaaagacctgaccgccatcaataaccgtttgaatggcaaccggaaggtgagaggtcccctcaactttgatgatgttgatttcgggttggtgagtgactctatggttgcaaacagcctctatctgcagaatggaagctgtgcttcatcatcaggtgcaccattcaaatcagagcaacctgactcctaggatccaatgttgtgtatattctttctttactcctctcttgaatccatatatattgtattaggtgctttatgagagggggagggcggtattgttatgagcggtgagattgtagaatgccgccactgccccttgtgcttttgtgtatgttgttaggtattattaaatgcagaatgtaggtctcattaggtaataattaatagtttcatgtcctagttcaacttgttttcatcatagtttgtaattttatgtttccacgatagccgattaatctatttagggataggccat

SEQ ID NO: 201 - DNA, 2598 bp, Glycine max
tgagacatggtagttttgagcaacaacaacacagcactcgccaaggaggaggaagaagaagaataaggaatttcttggacatatgaggcctttaacgttatggggtttgcaaaagtttgttcctttgattggttctgttggtgaattgtggaaaaaagattgaattttgagaattcgtatggattgtctgattgtcgtggtggagagtgcctctagtccgatgatgccgtaaagtctgattaataggttttttacttttcattggaggaatcagtttatttatatattctgggctgtttggttttgggagtacagttgaaacatgaattatcgatgttgatgcatgaatacacttaaaagatggtgatgatggaagatagtaattgaagaagtgattctttttgggaaatttggaagagccctgcctgaaaaataaaaatggggttgccacaggtggcttcaggctgcactgccgaggaagtggcagcatcactaggcacatttgtgcaaactgcacctagaatggccagcataggcagctatgaggtgaacttgttggctggagaagacctaggtaattgcatgcacattgatgtgcttaaatctgaaaaaaaaaatgttctagagctttcaaaagaaacacatatttcaagtatgtgtagtgatagtaagttgaagaatgaccccatggaacaaattagcaagttgtttgtcaattcagagaaaactaggcagacacctgtttctaggactgtaggttttcaaattagagcatcaactcctcgtgttaatggtttcggaggaaatggatattcatcacctgtgtttaatgtcatcagtgatgcaactgaggcttctgagtcacaacttagaaagcagttattgtcacctttgaatgggatgctgcttgcagatcattttaaaggtgatccactagacataggtgctggtatttatcaaagtcgttcaaaggctggtgatgataattctaatgctttacatgagtataagaaggatcatattggaaacaacaatcagattcactcaatgatctggtctacatcttgtttccaggaatttacaaattcattctgtaatgactctactataaaccatattgtatctagtcatcaccaacgtgcagagccatggtcttataagcattttaaatcatctccagtacgtaatgtttctgaagaaacaactaaaacaaggtcccaaacagctgcattgtctataccacaaaaaaatgtgtcatcacctcccttccctttgtctcctctgggtaaaaaatcttctaaaaatgaaaatttgggagaatgcagaaatattgatgttatcttggatgatggcaattttacttttaatagtgtggaacagtcacttgatagaacttgtcaaggcattttatcagctcaggagataccaggtaaatcacagctcaatttgaacaatatgcagcaaaagtctgacctgtttactcctgacaacatgattgatatgaaagaatactggactcattctggtagctttcctcctcgggatgccaagttatgtggaactatgagtagactgccaattagaaggtccttggttggttcatttgaggaatctttgttatctggtcgcctactatctgggaaagttagtccgaaaattgaaggctttcttgcattgctgaatgtaactggtggcaatttctcacctcaatcacaaaaaataccatttgcagtaaccagcgtggatggagacaagtacttactttattattcatcaattaatctttcaggaaagctattatcaggcaagtctagagttgctaaatttcagagaacccttagcatggatgaatcacgatctgaaaagcctcgtatacgtatacctatgaaaggacgtattcaactggttctcagcaatccagagaggacacctatccatacctttttttgcaattatgatttgagtgacatgccaactggtaccaagacattcttgcggcaaaaggtcactttaactgcgtctagatcaaagtctatgatgggtaaggaaagccaaacagattctgacaccagagctgatgccaagtcttcgttgatctcagtcaccagtcacagagataaagatcttctcacctcaaaatgtggagagtttgatagttttacatgttcaaaagctggcattttgctttatgctcttcaccttcgctttatgtgccccttgcctaagagacgttcaaggtctgttcataagtgcaaatctggccctgtctctgctgatatgagaaatattgtggacattgaacaagaaagaagcttctacttgtatgatgatatgagggtagtgtttcctcaacgtcattcagattctgatgagggcaagttacatgtggaatatcatttcccttcaaatccaaaatacttcgacatcagctgctgaaatgccgctgtctctcagtgatttttgtatatatagttgtaaatgttgtacgtatacaattcatttctttcaattctggggtgatttgcctccatgtaactaataatttgtaaatttggattgtagatgttcatatttgattcatagcacttgctttgaccc

SEQ ID NO: 202 - DNA, 1829 bp, Glycine max
gaagctgaagcgagtatgagacccaagttttgttttaacccatagaagaagaagggaagggttagcgagtaactactactactgtcacttgactcaatggaaggtgaagaggtgttggatgtggacattcaggaggagaagctttctggctttattttcatgtgtaatagaattacaaaaccggagtgctactgttaccgagttttcgggcttcctgctgggagaaaggatgttgttgagaagatcaatcctgggacatacctttttctgtttgacactgatgtcaagcttctctatggcatatacatggcaacctcgactgggaagctaaacatagaaccattagctttttgtcagaaattccctgctcaggtgcaattcaaaatttacaaagactgtttacccttgccagtgaattgctttaaacatgccattcgagataattaccagaaaggctccaacaaatttaatcctgaactcaatattagacaagtaagaagtctaatagaattgtttcgcccattacatgaattgccaattgcacctggacgtccttttatacagaaaccaatgaatattgtttatcatcagatatcagagccacccatttcggagggtgcatttttgtctaggatgtcacccaatcaagctccaaggctgttgaactataaacatgtaaatgaactcaggaagcctactggttgtgcctatcctgttcataatgttatgccttattcagctgcagcacagcttgtggcatcccaaggttcaacgaatcagctttattaccctgcaagtacacttgctctggagggtacttatgcacctgggataggcagcagtcatactcaaccactaccagatcctcaatattcacatcaaactatccttaacccacaacctgaatttcattcttccctgatgaacagcggtcatgctcagcaattgcaagagtctcaagatgcacatcataacatcatacatccccaatctgaatttcattcttcactgatggctatgggtagcagtcatactcaatcactgcaaggtcctcaatatccatatcagagtatcccaaacccatcacacgagttttataccccagtggcaaatgcaggcagcagtcaaccccagttgtcacgggatactcactatacacaccagaatatcctaaacttgcaacctgatgcttattccaccatggcgaatacaggcagtagttatgctcaattattgccagatccccaacacacacatcagaatgcccaaaatcctcagcctgattccaattcttccttggtgaatatgagccatgccactgtcacgatgcaattgcatactgtgtcatctttatatcatccatatgttcctcaagaagttgcaccttccatgtattcatcgcaatggagatgattcattgactgaagctatgatgttcaagattccagaggagaaattgctccattataaatttttatatttataattgtttgctgaacaagcatacttggtcatgtgcttactgcttggcattttgtcaatatctcatgcctccgctgtcgcccagatctggagccacacaaggcaagtggtcaacaaactggaatgggatagacctgaactcagcaaattcaaactcttagtacctaatcattttttcacttaaatattgcattttgctgccttctgagtatataaaggcgccatatatactgtttaattagtgatgttcaattaccctttttggtaggggtgtttataaactgattcgatctattgagaactgaaaaaattgatccaaaaaattgaaaataaaaaattgaatagac

SEQ ID NO: 203 - DNA, 1182 bp, Glycine max
atggctatgtctttacctcttcgtttctattcctcctcgtctttctctctcacttctcttggggttgtgagaaaagtgctcgggactcttacaacagatattgttcaaccaaggagtggaaattggcacttagcaaaaagaggtggaagactcatatcgtttaagggtcgtgcgaggctggtacatacaacgtgccgaatctctgtccctgggaccttaccaagaactgatgaaaaggcctcatctaacatctcgagggataagaagacagttccagaagcagatcctccgagtatcaaagacgttcagcttttgtatgaatttttggaccggagtaccaagctcacggtattgactggagctggaatcagtacagagtgtggcatccccgactacagaagccccaatggagcttatagttctggtttcaaaccaataacccatcaggagtttctccgttcaagtcgagctcggaggagatattgggcaaggagctatgctggatggaggcgatttacaacagcacaaccatctgctgcccatactgcattggccacattagataaagctggccgaatcaattttatgattacccaaaatgttgataggctgcatcatcgtgctggtagcaacccattagaaatacatgggactgtatacactgtaatttgtatagattgtggatattccttttgccggagcttatttcaggaccagttgaagacccttaatcccaagtgggcagaagcaatcgataacttggaccatggaaaccctggatcagataagagttttggcatgaaacaaagacctgatggtgatattgagattgatgaaagattttgggaggaggattttaccatcccaacttgtcataagtgcaatggagctctcaaacctgatgttgtcttttttggtgataatgttcccaaggacagagctgatatggcaatggaagcatctagaagatgtgatgcttttcttgtactcgggtcatctctgatgaccatgtctgcttttcgacttatcagagcagctcatgaggctggtgctgctactgcaattgtgaacataggtgtgacgcgtgctgatgattttgtgcccctgaaaataaatgcacgattgggtgagatcctgccaagagtacttgatattggatctataagcatacccgctgtataa

SEQ ID NO: 204 - DNA, 844 bp, Glycine max
tttgtgttttcgattcgaacacggaaacagataagatttaagacaatggaggattaatctgaatttaagtcccgctggtctttgtaattactacgccatatcaagcaaaatcgaagaaacgcgacgatccacttgcacaaaatccgcggtggaggcagatcacatagatggaggcacagtctcagagcaacaatcctaaccctaaccctaaccctaaccctaaccctaaccctaaccctaaccctaaccctcatcggaataattcggtagcgtcatcgatgccgctgtggccaacgatcgacggcccattgggcctgtcggaggaagagtcagtgggctacgctcgcaggttctacactttcggcttcgctcttctccctctcctttgggccgtcaattgcttctacttctggcccgtccttcgccactcccactccttccctcgcattcgcccctatgttgttggatctgcaattgggtttgcagtatgtgcgacacttctcagttcttggagtctaacatttgccattggaggggaacgcctcttcggccctgtttgggatcaattggttatgtacaatcttgctgataggttaggcttaacaggttggagctagttgtgtggcacctctgatacaaatattttgatcttttattaccacacttaccttcttccctgttttttgaatgcatctgcattacctatacattttactatattctatcatgaaactagtagtgaattttatcttgctgccacagttgatagataacaagcaatgttttggaagaggatatagttcttggtgtctttactttatttgtatgtgtgtgtgtgtgttat

SEQ ID NO: 205 - DNA, 2007 bp, Glycine max
atgctgatctctgatgaaggagatagtgatttgttctttgactcagtggattgtttctcaccaacccgagagtctcttttgacaaaacaagagtttggctatgagatttgggtgaatgagcctgtgagtgtgatggaaagaagggaaaagtttttgcaggggttgggattgggtgatggatcatcttccaaggtttgttctcaagagaataatatgatgagttctgatgattcatcagtgagattgggactagagaggatcagggatagtggggcagcttcaaatgcttgtagttgtattttgcctgatgatcaagtttctgagttggttctctcgggcagcgaagccacttctgaggcacaagccttgtttgatgaacataagggatgccccaaagatgaatcatgttttgaagggaaggtttatgaggtttcttgtacagatcaagaggttagacatagaaaagtcgaggttccagaaaagtgtcttggttttgatatgggtgaaaaggagaagaaaaactggtggaagcactttataagcagcaagaaaggaggtggaggtaaattcagatcaaaattgaattcaacgacaaataaaactcgaagaataaatgtaaggcagaataagaagaggtggatggagttcagtgcactgtatattggacaagagattagagctcacgaaggcctaatttggactatgaaatttagtcccaatggccaatatctagctagtggaggagaagatggtgtcatacgcatatggcgtgtaaaaacactgaatacatctagtatttgcttgaatgcagaagacagtgcagctagcaaagtgaaacatgacttctctagttctcagaagaaacactcaagccaatcatccttcatcgttcttccaaataagattttcaaaatcgaggaatcaccgttgcatgaattttatggtcatgcaagtgatgtcttggatttggcttggtccagttcagatactctcctttcatcttcttcggataaaactgttcgcttgtggaaaattggttgtagtcaatgtctaagtgttttctatcacaaagactatgtgacttgtattcaattcaatcccgttgatgaaaattacttcatcagtggttccatagatggcaaagttcgaatatgggggatacatgaagaacgagttgttgactgggcagacataagagatgtgataagtgctataagttaccgaccagatgcaaaagggtttgtagtcggttccctcacaggcacttgccgtttttatgttgcctcaggcaaatatttccagcttgagacgaagattcgtgtcaatggaaagaagagaacatctggcaacaagattacaggcattcagttttctcagaaaaaccatcagagagttatgattacatctgacgattccaaagttagaatattggaaggcattgaacttgttcagacatataaaggcctttcaagatccggaagccagatgtctggttcatttacctctggtggagaacatataatttcagttggaggggactctcgggtgtatatttggaacttcaatgactcgggaaatgcctcttccaaacagacaaaatccaattattcctgtgagcactttggctctgagggggttactattgcaataccttggtctggcatgagtgcagaagaacgaagtggctcttccaatgattttacccactattcttcacaacaccaactagaggcctctcatggtgttagggagtcggaacgattttctttcggaagttggttctcgattgatggttcatgccgcggttcagtcacatggcccgaggagaagcttccaagttgggatctacctcttgtagaagttgaatttgatcaccagaagctatgtaccaaagatccttcccatgaaaaacatgtatcagaaacatggggactatccattgtggcagctggttgtgatggaaccatcaagacattccacaactttggacttcccattaggctttag

SEQ ID NO: 206 - DNA, 246 bp, Glycine max
atgatgtctatcttcagccacttggagatcgcgcaagcccagaattggaggttttccttgggcacggggcccgtaaaaggagttaattcaaagcccaaaatggaagccacttcttcctccgccgccagaaaagatccgaatccatcatcaaccgctggatccaaacaaaacccgccccgtttgaggcccaggtttgcgccggagttggatgggttacactgctttgaatccatcgtaccctgttag

SEQ ID NO: 207 - DNA, 530 bp, Glycine max
aaacacaacaacctgaacacaataacagacaactcaaccacaacgacgccatgatgtctatcttcagccacttggagatcgcgcaagcccagaattggaggttttccttgggcacggggcccgtaaaaggagttaattcaaagcccaaaatggaagccacttcttcctccgccgccagaaaagatccgaatccatcatcaaccgctggatccaaacaaaacccgccccgtttgaggcccaggtttgcgccggagttggatgggttacactgctttgaatccatcgtaccctgttagctccaatttcaattcacgactcataaaaatcataggcaattcaattcaatttatttttactgaatagtttaatcagtagttgagaaagctatgtactgtacggacgccagagatcaaattgtgcttcccaataacttgaaaattaattgcaagttaaaatttgaaatggtattctttttattgctaattatgatgattgtagttctacttatacactagcaagcaatctttttt

SEQ ID NO: 208 - DNA, 544 bp, Glycine max
atgacatgtatatgtcatgttcttagttccaatctaactgctcataacaaaaggaaccatatagacaccttcgtacttgtcatggcccttaagatcaacactttccttctagttcttctcttgatcctcattcccttatcttcaggcttggctgaaggcttcggggaaaacatgcatccaactcatggcttactttataaggatggtatcaagatgaactcgaggaagcttttggttcatgattttgtgttggattatgatgaggcaggacccaacccaaggcacacaaagaaacctggcaagggcccttgaatacccttacaccaaataatgaaataaattaatctatatactatcatctctcttcctactcaatgttttggtcgcgtatgaggagatatgtaaacgggtttcttcttcatcggagccactacttgtgtgtgttatgaggcaataaattagtatgatattttattatgtacacctggtgcgtatgtatggactatggaccattaagctgagaatattataataaagttttatc

SEQ ID NO: 209 - DNA, 6707 bp, Glycine max
tcggaaagaaacgaaggaagcagtgtctctcgttcgctttggttttgtttttcttttgtttgtgctgtttttctcaaaccgttttggttttggtttttatttttgttttcgttgacaatttcaccaaccatctctttctttctctctttcctctgcgcgcgacgcagacccaactctctctctctcttcaacccagtgggaaaagaagaaaagaatatttctcattttattatcttttattttctggaaaacaaccattcttgaaaaaggcctaagcctaacctccttatcctcaatctcgcacatcctgagaacaagagggtatcaggataatgccgctttctagggttttctttgcaggcaatggttttcacgtggagttaatcagagagtgacggcgggttagtggttgtgtgtttctatcgttgatggtttttgaatgattgaaatggggtcgtgtgggagatctgctgccattgatgatccctcagaaaagtttgtaattgagcagcagcatttgtgctcagaggttcaagagcaggttgtttctgtgcaggagtcttgtttagaagaagaggcttacaatgtggtggactctaatgttgagctctccactgtgactgatggttgtctgcgaggggaccgtgtcagttctgaaggacgtgttgatgttaccgaggggtccggagagggtttgggtttggcgagtgaatgcaaaaatgctgatttgttgccactggagaaatctactcaggatgattgtcagaattgtttgggtgtttcttgtgggagcattgaagttctctgtgtaaacagtggctcagagggaaattttcaggatgagggtatctttgatcagctgtcggggtccttaactgcagatgattcacagaggcgttgtgctcaacaggatgagcagaaggatgatgagtcagggtccttaattacagaggattcacagaggcattgtgctcaacaggatgagcagaaggataataagagtgacgtattgcctgctgcaggagatgatttggatgtcgtggaaggcaaaaatgatgagactggtgttcttgctgatgctttcagtcatgcacttgatttcagggattgcgaagtgtctttggagtcagaatccatggctgacttgctagttgattgcaaccagcaaagtgagcaggagaaaattatgagaaatccagatcccttgttgaatgtagttgaaaaatgtgacgctctaattggggaggaaactgatgcttgcaggaagatatctcctactccggctatggaagtgccatcaggtgcattatgtacagatacagaagtagagagcataaatgatcacccatgtgatcagaaagatggtgaggaaactgatgcttgcaggcagatatctcctactccgactatggaagtgccatcagatgcattatttacagatacagaagtagagagcataagtgatcagccatgtgatcagaaagatggtgaggaaactgatgcttgcaggaagatatctcctactctggctatggaagtgccatcagggccaccatcaggtgcattatgtacagatgcaaaagtagagagcacaaatgatcagccatgtgatcagaaagatattgaggatcagaatagtacttgtgaagaaaagtttaaagcttttgttgatgaagaagtcatcaacattaattcatgtataaaaatatcatcctctctagattgccaggagactgttgcgagctcacctgtagttggttttccttgtgagcctgccctgttggatccagggtgtgaaatgaagaatgacatgctgcaaatagatgatttctgtaaattgaaggactgttcctcagaggaaactaccaactctacctttagaaaaccattttctcctgaatcagggcagatggataatgatggaacaaaagctgttgaagttgattgtatcactgaaagcataccgttaccttctctaagggatagtcgaagaactaaatttggccgtaagacacaaaccaaaaaggcttcaagaaattgcaagaacaaaaccaaggtgacacattcaaatgggggtatgaagctaaacttagaggctgctagaaagaaaagaagttgtttctccaaaccagctcgttcttctgtctggggattgattgggaatattgaacagttttttgagcaagataatgagcttggagttggtgaagctgtgtgccaagaattggggaaggctagaagcaagcgtcaaagtgggaaagcggttaagaatggtgcaagtactacctcattgagttcagtacagaagtgttctgtttcaactactcgtgttcgtctgaagattaaatttgggaaagaagttgatttaagttgctcaaatgtcttgattccagagtcagttgatggtttggcttctgcttcttacttggtgtctgattcaggttctcagaaagtagccggcaatgctgatgataaaatttctgatgcggtggctttgggaaattcagaatctttcagtaatgacctgggcaaggatggtcttgttctaaatgaacaagttgcaaataaccccttagaaactactgaaataacagagaagtcatatggggatgcagaggaaccttgtcttgctgttcctcctgagaaggtggttgaagcattgattgaacctatgagtaataagggtatggatcctggaacctcacctgattctgaagttatcaattcaattcccgaagtccagattggagaaagacatcaagaagatgtacatcatgctgttttaggttcttctaaagaattaaattctaaattgaatgttaccatcagtaagagagggaagaagaaagagaaacttatttgttctggtaattgtatcactgaagatggatcacaaggtccacgtgggaatagtagagctaagcattcaaagaatcacagacgtaagaaaaattgcagggatgcatttagctctttggagttgcccactgagataagcaaatctgtgaccagtaaagaattgtccccagaattattgccccattctggagagaccgaacttggaggctccgtcgaggctttgaaagttaaaaatcatatggacgctaagacaagtaataaaccatctgttgaccatggattttcagattccctggtttctgagaaaatgctgtcatctgcaagacctttggggcgtaaactacctaaaagtcttagacctagtaaagttagcaagaccaaatctaaagcttctgactcatctggcaggaaaaagactactgctggtacatgcaaggagaaacagaaaaatccaattaataagagcaaagtcaagggaaaaggtgcctctcttaaagttacatgtgaagtggaagattgcccacatccagaagcaaatgctggaaatcataagctggatgctattggaaaaattattgctgatgacaacagagtatcggtcaatgtatctaatttggacatgctgtctggtgttggttttggggagcaaattctatcaccccgtaatgcatgggtgcgttgtgatgattgtcacaagtggcggcgaattccagctgtgcttgcagaccgaattgatgaaactaactgcacctggacatgtaaggacagcagtgataaagcctttgctgattgtgctatccctcaagaaaagtctaatgcagagattaatgcggagttgggattatcagatgcctcgggtgaagaagatgcatatgaaggttccaaaaattttaaggaattagaatattggccacctatagtttcccaggagtcaacttttaccaatattttgaccaatgaatttctgcatcgtagccataaaactcagactattgacgagataatggtatgtcattgcaagccatctcaaggaggaaagttaggctgtggggatgaatgtctaaatcggattcttaatatcgaatgtgtgcaaggaacctgcccatgtggggaccgttgttccaaccagcagttccaaaaacacaagtatgctagcctgaagtggtttaaatgtgggaaaaagggttacggactgaaggcaattgaggatgtagctcaaggccagtttcttattgaatacgttggagaggtgcttgatatgcaaacgtatgaggcacggcaaagagagtacgctttgaagggccatcggcatttctattttatgaccttgaatggtagtgaggtgatagatgcaagtgcaaaaggaaacttggggcgtttcattaatcatagttgtgatcctaattgtcggacagaaaagtggatggtgaatggggaaatctgtattggactgtttgcattgaggaatgttaagaaggatgaagaattgacattcgattacaactatgtaagggtttttggtgctgctgccaaaaaatgttattgtggttcgtctaactgtcgaggttatataggtggtggtgatccacttaatgctgaattgatagttcaaagtgattcagaagaagaatttccagaacctgttatgcttaccaaagatggtgaaattgaagatgctgtacctacacccaagtattttaataatgttgatacagaatctgctaaacatatgttgaaagacagggatatattggaaaatcctacaactgctatagattcagatggttctccagagaaagagagttctatgaaccctgcctctgccgtttctctgttgcacagctcagcagaaatggaggattcaaagggcaaattaccatcttctgttagagatgaagaaatttctcaacaaatggaggatgtaacaagcaaacccatgccttctgtacaccaaggatatgaaaaggaatcagagtttgcagacaaaacttcttccattcaaagattagagactacttctccccctacaactgtcagcaaaatgttaccgaattctgctggtagtaatagggagtccaagtctgaaataattggaggcaagaagactcctaagttaaatggttctgttaaaaaggggaaggttcatgctaatcctccaaatggccttaaaactgaggtgacagccaatcgattacaggtgtcatctataaaacacaaaaaagtagaaggttcttccaatggacggtttgaagcagttcaggagaaacttaatgagttgctggatggagatggtggaataagcaaaagaaaagatgccaccaaagggtacttgaagcttttgtttctcactgtggcatcaggtgatagaattaatggtgaagctattcaaagcaatcgagatctttccatgatccttgatgcccttctgaaaacaaaatctagagcagtgctgaatgatataattaacaaaaatggtttacagatgttacataacattatgaagcagtacaggcatgacttcaaaaaaattccaatactacgaaagcttcttaaggtcttggagttcctagaagcaagcaagattttgacatctgaacatattaatggtggtcctccttgtcatggaatggagagctttagagagtcaatgctttctctgacagagcatgaagacaaacaggtccatcaaattgctcgaaacttccgagacagatggtttcccagacacgccagaaaacatggctatatggacagggatgataacagagtggaatctcacagaagtttcaagtgcaacagattttcagcatcacacagtcagaggcatgaacaggatttaaggactacagaagcaattgattgtagtcagcaggcgatgcttatgacaactccagtagatgctgaaacctgggaaggctgtcctgtgcagtctctagatggggttgaaatcaaaagagctaaaaaacgcaagcgcaaaagccgatgggatcaaccagccgatacaaactcgcattctgatgctgttatgagctctatcggtgaaagccagaacattcccgaggatggtccaccagggttttcatgtccagtaggttcattaaatgcttccctaaactctggtaatcttgccttgcaaaatgcaagccgttctggatgcccctctgatatagttattggtcatccaaaagagaaatttaactctcacttgcctgtctcatatggaatgccatggtctgcccagcaatatggaacacctcatgctgaatttcctgagtgttgggtcactgcacctggcatgcctttcaacccatttcctccactacccccgtatccacgggacaacaaagactgtcaaccttctaatacaactaatgctatgataattgatcagcctgctgaagttaagcagggggataccagtggtatggttaattgttgctcagatgatatgattcccagcacaactggtgttaactctgaagactccaacctactgtttgaggacgataaacacataagtaaacgattgaagggtgattccaatgatttgggaacgaggtactttagacagcagaaaatacaccgaccatggttcaagaggaatgcatggaaatgtgatgagaacaactcttgtggtgatatgtgcagtatagatgtaggagatgtaccaaaagagtcaaaagttacttgtgacgcggaggatgcaatctgtagagaggagtaaggtggcgatattatttattagcatgcacagcagcaatatcaatattgttcacaggaaaaagaaatatttttgttttcttttttcttccttatacattaatgtactgtcaattcatttgttcctg

SEQ ID NO: 210 - DNA, 1467 bp, Glycine max
atgtcgggtgaggagacacagaggaatgtgtttggcgcggaaacggcgtcgtccttggtgaaggagctgagggacaacttcggtaaaggaaccacgcgaagttacgaatggagagtgtcgcaagtgaaggctctattgaaggcggtggttgaaaacgaggaccagatcgtcggtgctctttgttccgacctagccaagcctccgctcgaaaccgtcgtctacgagattggtatgtttcaaaactcatgtgaagtcatactgaaggaattgaaacattggatgacgccagaaaaggtcaaaacgtcaatcagaacttttccttcttcagctgaaatagtacctgaaccgctgggtgtcgtgttagtcatctctgcatggaactatccaatcttgttgtcccttgatccagtagttggagctatagcagctggtaatgctgtggttctaaagccatccgaaattgctccggccacttcatcagtactagcaaagttgatagagaagtatatggataactcatttgtaagagttgttgagggggcagttgatgaaacaactgcactattgcagcaaaagtggaacaagattttctacacaggtaatggaagagtgggaaaaatagtgatgactgcggctgcaaaacaccttacaccagttgtactggagcttggaggaaaatctcctgttgttgttgattcaaacaacaatttgctggtagcagctagacgaataattgctggcaagtggggattgaacaatggacaagcctgcatttctcccgattatgttataacaacaaaagactatgctcccaagttggtggataccctaaagactgaattggagtcattttatggaaggaacccgttggaatctgaagatttgtctcgaattgtgagttccaaccactttgctcgcttgtcaaagctcttgaatgatgataaggtttctggcaagattgtttatggaggcgaaaaggatgaaaagaaattaaggattgctcccactattttattggatgttccgcaagattcttcgataatgggtgaggagatatttggtccattgcttcccatcatcacggtcaataagctcgaagaaagtatagatgtgatcaactcaggagcaaagcccctcgctgcatatgtatttacaaccgacaacaagttcaaggagcagttcgtaaagaatgtttctgccgggggtttgctcgtcaatgacactgccttacatcttgtggttgataccttgccatttgggggagttggggagagtggaatgggtgcataccatgggaagttctcttttgatgcttttacacacaaaaaagcagttctttatcgcagttttgctggggattcagcaataaggtacccaccatacacggatacaaaactgagattgatgaaggctctcgtcggtggtcgtatcctcggaataattcgtgctcttttcggatggtcctaa

SEQ ID NO: 211 - DNA, 1506 bp, Glycine max
tcagatgtatatataaatatattcaatattcaattctgagcatcaacagagggactctcgtggactaataaccaaattccaagtgacagattctatcaagctagctacctatagaaaactcttttattatttgggcgttgcaagagataaatgaaaatggacatatacgagccatttcagcaagttagcatgtgggggggcaactttaaagttgatggcggtctgaattcaattgcttccccaatgttaatggttggcactaatgtggagaacaagtcagagtatattcctcgggaaccaagagagccttctggttctggagccgatcaagaaactacaaataaagatgttaataagatgctaagacgcctagctcagaatcgagaggctgcccggaaaagtaggctgcggaaaaaggcttatgttaaacaattagaatcaagccgtttgaagctcatgcaattggagctggaaattgggaaagcaagaaagcagggtctgtatatgggcactgcattagatgccggctatataggatcaacatcagaaacaataaatccagggattgttgcttttgaaattgaatatggacaatgggttgaagagcaagaaaggcggaatgaagaacttagacatgcatttcaaacacaagcacctggtgtacagctcaacgtagtggttcagagtgtcttaaatcattactcaaatcttttcagaatgaaagcagaggctgtaaaggctgatgtcctctatttactctctggtgcgtggaaaccatcagtggagcgaattttcctttggattggaggctcccgtccatcgcagcttctaaacatcatcgtgcctcaacttgagcctttgactgatcaacaaattgttagtattaacaacctccgcctatcgtctcagcaagctgaagatgctctttcacaaggattggaaaaacttcagcagagtttggtccacgacatggcagttgatccattgagtgtaggaaacttgggacttcagatggctcgtactatggaaaaatttgaggcactagaaggttttgtaaaccaggcagatcaccttaggcaacaaactctgctgcacatgtcacgcatcctgtcaattcaccaagctgctcgcggcttgctggctctcggggaatactttcatcgtcttcgtaccctttgctctctctggtctgctcgttcatgtgaacttgcctaggctccttagaggaagagacctagctgctctgcttcaactgaatcatctcttctgtgcttttcaaaacagttactcgattttggatatgaatgagttaatgccgtgtaccagcatgaagcaaaattatgtgatttgctgctcttgtgagtgtgcttgtacataaacagtgtatcatctttagtactatattatatatattatgtaaaactttctagtatctttcggaataaaatgtccattatgttactttaaactggttactttgagtttattgtcaatgaaaagagaggg

SEQ ID NO: 212 - DNA, 2113 bp, Glycine max
gaaaccctctgaattctccttttgtattggggtgtgtgtatccactctcttactgagaggctaaacctaaaacccttacctttccttcccgccctcataatgagggacacaaactgagagtgaaatgcagaaactgctacgcccttcttcagttcccttcctctctatctctgtcaccgtggctactccctttctttcgttgcctcccaaagttgcaaaccaaccaatgtcagcagctgctgctggttcttctctcaagcgccaactctcttattcccgctatttggcgctctctagtaccaacacttgctctgtctgcaggtgtctcagtctaacccacacccactcccaccccaagaataacaagacccttcttctccttaaccactctagaaaccgctccttgcattcggcttcagaaggctctttcatcacccaacccgaccctgttgagtatggttctcttgtggactcaaaagagaagccctttaactccaggctaaataggaggcaaaagggttctacttcttcttctcctgctccgtcaaatcctgatttgctggccatccccggtgtgggtcccagaaatttcagaaagctcgttcagaaaggtatcgctggtgttgcgcaactcaagcaactctacaaggataagttctttggcaaatctagtgacaagatggttgagtatctacagaattctgttggaataatccacaagaaccatgctgagagtataactactttcattaaacagagtgttgacgaggaggagttggaagacaattcctcttcctctgttcagaagaagcgcttaacattctgtgttgagggtaacattagcgttggcaagactaccttcctccagagaatagcgaatgaaacgatcgagttgcgtgatcttgttgaggtggttcctgaacccattagcaagtggcaggatgttggacctgatcactttaacattttggatgctttttatgccgagccgcaacggtatgcctacacctttcagaactatgtgtttgtcacacgggtcatgcaggaaagagagtcatctgctggaatcaagcctcttcgtttgatggagaggagtgttttcagtgacaggatggtttttgtacgagctgtccatgaagctaactggatgaatgggatggagatcagtatctatgactcgtggtttgatcctgtagtatcctccttgcctggacttattcctgatggttttatctatcttagggcaagtcctgacacttgccataagagaatgatgttaagaaaaagaacagaagaaggtggagtcagccttgactatctctgcgacctccatgaaaagcatgaaagctggttatttccctcccaaagtggtaatcatggagtattatctgtcaatcagctgccccatcatattgacaactctttacaccctgatataagagaccgcgttttttatctggagggtggtcacatgcattcaagcattcagaaggttcctgctttggttctggactgtgaacccaatattgatttcagcaaagatatcgaagcaaagaggcaggttgttgttgagctgggcttgtagtcttgtactagttgtatgctaggtgcctatgtcccaattgcaaggtatgggacttgattcctacatctcaagtatggtattctgatgtgtggtttatatgaagttgagctttccctccataatggataccttttgtaatgtggttctcccaaagttgatatcaattcatattagagccttctaccacgtctcccagttgcaaatgagtagcatgagctgtgatgttggcattgcagtctctacttggaactagactagtgcacagcctggctatgtgtgctgggactggagagcatagtgggatgtgaggttccatttgtaagatatgagacctgagccccgtattggaaattcgtgcttgcccaccacaatggccaacttttgcggtgtggtttacccaaagtttgtgtcattacactactctagtaattgacctagattgttggtataaattggattgttagtgctttgtaattttagaagttaagaataatactaccctgatactattttcatcaaaccatgaga

SEQ ID NO: 213 - DNA, 1536 bp, Glycine max
atggcgaacatagacatcgaagggatcttgaagcagcagcagccttatgatgggcgcgttccgaagacgaagatagtgtgtactttgggccctgcttctcgatccgtagaaatgaccgagaagcttctgagggcagggatgaacgttgctcgtttcaatttctctcatggcacccacgactatcaccaggaaaccctcaacaatctcaagactgccatgcacaacactggcatactctgtgccgtcatgcttgacactaagggacctgagattcggactggttttctgaaagatggaaaacctattcaacttaaagaagggcaagaagtcaccataactactgattatgacattaagggggatccggagatgatatccatgagttacaagaagctgcctgtccacttgaagcctggaaataccatactgtgctctgacgggacgattactctcactgtcttgtcttgtgaccctgatgctggtactgttagatgtcgttgtgaaaacactgcaacgttgggtgagagaaaaaatgttaaccttcctggtgttgtggtggatctacccacacttactgagaaggataaggaagacattcttggatggggtgtacccaacaagattgacatgattgctctttcatttgttcgtaaaggctcggatcttgttaatgtccgcaaggttctggggccacatgcaaagaatattcagttgatgtcaaaggttgagaatcaggagggagtcctgaattttgacgaaatcctgcgggagactgatgcattcatggtggcacgtggtgatcttggaatggagatcccagtagaaaagattttcctggcacagaagatgatgatatacaagtgtaatcttgttgggaagccagtggtgactgctacccaaatgcttgaatcaatgataaagtctcccaggccaacccgagctgaagcaactgatgtagctaatgcagttcttgatggaacagattgtgtgatgcttagtggtgaaagtgctgctggggcatacccagaacttgctgtgaaaatcatggctcgcatttgcattgaagcagaatcatcccttgactatggtgccatcttcaaagagatgataaggtctaccccattgcctatgagtccattggagagccttgcatcatctgctgtccgcacagcaaacaaggccaaagcaaaactcattgttgtgctgacacgtggcgggtctacagccaagttagttgccaagtataggccagcggttccaatattgtcggtggtggttccagtgttgagcacggactcatttgattggacctgcagtgatgagacgccagcaaggcacagcctgatatacaggggcttgattcctatactgggcgagggatctgcaaaggctaccgatgcagaatccacagaggtcattctcgaagctgctcttaagtccgcaacagaaagggccctttgtaagcctggtgatgcagttgttgccctgcatcgtattggagctgcctctgtcataaagatctgcatagtcaaataa

SEQ ID NO: 214 - DNA, 1020 bp, Glycine max
atgtcaacctcttccataaacgggtggtgcctctcttccatctccccagccaaaacctctctcaggaaggccacattacgcccttccgtcttcgcaacccttaacactccttcttctccttcctcttcatcttccttcccctctctcattcaagacaggcctgtttttgctgcccctgcccccatcatcaccccaactgtgagagaggatatggcaaaggaatacgagaaagctattgaagaacttcagaaattgttgagggagaagagtgaactcaaagcgacagctgctgaaaaagtggagcagataacagcttctctagggacatcatcatctgatggcatcccatcatcagaagcctcagacaggatcaaagctggtttcattcacttcaagaaggagaaatacgacaagaatccagctttgtatggtgaacttgccaaaggccagagccccaagttcatggtgtttgcttgctcagactcaagggtgtgcccatctcatgtgctagatttccaaccaggagaggcctttgtggtcagaaatgttgccaacattgtcccaccatatgaccagtcaaaatacgctggaactggggctgcagttgagtatgctgttttgcatcttaaggtgtcggagattgtggtcattggacacagtgcttgtggtggtattaaggggcttctgtctttcccatatgatggaacctactctactgattttattgaggagtgggtcaaaattggcttgcctgcaaaggcaaaggtgaagacacagcatggggatgccccttttgctgagttgtgctcacactgtgagaaggaatctgtgaatgtttcccttggaaacctgctaacttacccatttgttagagatggcttggtgaacaaaacattgtcactgaaaggaggatactatgactttgttaaaggatcttttgagctctggggccttcagtttggccttgcatcctctttctccgttaaagatgtggccaccattctccattggaagctatag

SEQ ID NO: 215 - DNA, 324 bp, Glycine max
atggcccagagaaatgttactgctaattcttcttttgaaaggactagcttgccttccctagatcaaaagttggccatggccaagcgctgctctcatgagggtgtgatggcaggagcaaaagcagctgttgttgctactattgctactgccataccaactctggctagtgtaaggatgcttccttgggcaagagccaatctcaatcactctgctcaagctctcataatttccacagtggcgggagcagcatatttcatagtagctgacaagactgtcttggcaactgctagaaagaactccttcaaccgaccctctaatgcatga

SEQ ID NO: 216 - DNA, 781 bp, Glycine max
agcaacttcagcaactcttcatccaaagcttcttcagttattcatctgcttactaaaatttcttccattcttagctttgttcaatcaaagttttttaagatggcccagagaaatgttactgctaattcttcttttgaaaggactagcttgccttccctagatcaaaagttggccatggccaagcgctgctctcatgagggtgtgatggcaggagcaaaagcagctgttgttgctactattgctactgccataccaactctggctagtgtaaggatgcttccttgggcaagagccaatctcaatcactctgctcaagctctcataatttccacagtggcgggagcagcatatttcatagtagctgacaagactgtcttggcaactgctagaaagaactccttcaaccgaccctctaatgcatgaattccaaatggataatttggattttggattcggcttcactacgttgggctatcttagcattgacccaatcatcggacttatcatatatgtaaatgtaattatgtatcgataataaagaagagtttgcatttcaatcgtgagacagatcatatatatgtgccaattatcagttaattatatgaatgcaaatcattcatgcaccttaatttcttctaaataagtacgtatgttatataccattaaattgaacatatagataatgtttcaccctgcagtcattgcatgaagaaaacccatctttgataaatggtgaaaacgatttctatctcttgcaattatctctctattgaagatcttg

SEQ ID NO: 217 - DNA, 2158 bp, Glycine max
aataatgtctggttgtgtatgtaggtttttcacttgatctctcaaatgaatccacatttgtgtccttcccaattatttaattttccgagtgagttggaatcggagtggatgtggattgggtggtgaaccggtgaaagatgcgacgacgggctgccgagtatcggcgcccggcacgacggaggttttcatattggatctggcttctccttgctttctcctccatcctcgctttgctccttttccttctccaacacaatcaccaccaccaagatccgcttcatcatcctttgagagaaatgcaagagttgaacattttgctaaggagggtttcaattttactgaagagattttaagtgtaacatcattttcgcgacagttagcagaacaaatgattctggccaaggtttatgtggttattgccaaagaacacaacaatcttcaccttgcctggcagcttagctcaaagatcagaagttgtcagcttttgctttcaaaagctgccatgactggtgagcctgtcacattggaggaagcagagccaattattaaaagcctttcttttctaatgtttaaggcacaagatatccattatgacattgcaaccacaatagtgactatgaaatcgcacattcaagctcttgaagagcgtgccaatgcagcaatagttcaaagcactgtgtttggtcaaatagcagcggaagcagtacctaagagtcttcattgtctaaatgtgaaactcatgtctgattggctaaagatgccatccctgcaagaattctcagatgagaggaaaaactccccacggcttgtggacaacaatctatatcatttctgcatattttcagataatgttctggcaacatctgtagttgtaaactcaactgtctccaatgcggatcatcctaagcaattagtctttcacattgtcactaatggaatcaattatggagcaatgcaagcatggttcctaaataatgactttaaaggagccaccatagaggtacaaaacattgaggagtttcattggttgaacgcatcttattctcctctttacaagcagctcctcaatcctgattcacaaaccttctactttggagcatatcaagatttaaatgatgaacccaaaatgcggaatcccaagtatttgtctttactgaatcatctccggttttacatccctgagatttatccgcaacttgagaaggttgtcttcctggatgatgaccttgttgtccagaaggatctgacccctcttttctctctggatttgcatgggaatgtgaatggtgcagttgaaacttgtctggaagcatttcatcgttactacaagtatctcaacttctcaaactcaattattagctcgaggtttgatccgcaggcatgtgcttgggcatttggtatgaacatttttgacttggttgcatggcggaaggcaaacgtgaccacaagatatcactattggcaagagcagaatgctgatgggactctctggaagctggggacacttcctcctgctcttctttgtttttatggtttgacagagccacttgacagaagatggcatgttttaggattgggttatgacctaaatattgacaaccgcctcattgaaagtgcagcagttattcacttcaatgggaacatgaagccatggttgaagttagctataggaaggtataagccactatgggacaagtacgtaaatcaaagtcaccctcatcttcaaggttgtgtcacaagttgaaatgcactacttctcgatatctgatggattatgcaatctcagattattttatattcttgatctgtggttgccttaatgtagagtcagaagtagaaaattttgactttgctaggaatattttttcaccccttctctttccttttccccaatttttcttttgaattagtcttgaaagagaacagaatgatttcttatacactacaaagttgatatgcgttaggtgaagagatgtgggagaatccatttttggccggtggggctatcttttccccttctgcaagtggtagaatgattgttctttagtaattcttgtaataatttatcagctctttcaaatagcaatgtaatcgaatgaaaaacattttttcaccttctctctcatgttattcgttatagaaatcatacagtaactcc

SEQ ID NO: 218 - DNA, 1679 bp, Glycine max
tactacccccaactacgtactttcttctcatccctagcctcctcacacaacacaaacaccaaatcaaacatggccaccacttttctttctctcctcttcctcatcttctctctcctcaccccagccctcatttcctcttcccctgtccaagaccctgaatttgtggcccaagaagttaacaggaaaatcaatgcttccgtagctagaaggaatttggggtacttgtcctgtgcgacagggaaccccattgacgattgttggaggtgtgacccgaactgggagaagaaccgccagaggctagcggattgtgcgattggtttcgggaaaaacgccatcggaggaaagaacggaaaaatctacgtggtgaccgattccggcgacgacgatccggtgacaccgaagccgggaaccctccggtacgcagttattcaagacgagcctctctggatcatcttcgcaagagacatggtgatcaagctgaaggaggagctcatcatgaactccttcaagaccatcgacggaagaggcgccagcgtgcacattgcgggtggtccatgcataacgatacagtatgtgaccaacgttataatccatgggataaacattcatgactgtaagcaaggtgggaatgctatggtgcgggactccccacggcactacggctggaggaccgtgtcggacggtgatggcgtgtcgatctttggagggagccacgtgtgggttgaccattgctctttgtctaactgcaatgatgggttgatcgatgccattcatggctctaccgcgattaccatctccaacaattacatgactcaccatgacaaggtcatgcttttgggccacagtgattcctacactcaggacaagaacatgcaggttactattgctttcaaccactttggtgaaggccttgttcaaagaatgccaaggtgtaggcatggatattttcatgtggtgaacaatgactatactcactgggaaatgtatgccattgggggaagtgctaatcctaccatcaatagccaaggcaacaggtttgttgcacctgatgacagattcagcaaagaggtgacaaagcatgaggatgcagcagagagtgaatggaaggggtggaattggaggtcagaaggggacttgttagtaaacggtgcgtttttcacggcatcgggggctggagcctcctctagttatgcaagagcttctagcttgagtgcaaggccatcttcactggtggggtccataaccactggtgcgggtgcactcacctgtaggaagggttcccgctgctgattatgacccctccagcaagcaactgtatctgcaggccgctccattaattccaaaaaaatggaatggaatcaagaatcaaggggggagggaaggggaaagagaatgaccttattaaattaactacggtcatttctttaatagttaggatgtatattttcctatgatttccttcctgcattcttttcttttgttttctctagtttttttttttttttttttttacttttgggtttctgatttggtctacttttgtatgattacaatttacaacctccgcctgtaaacctcatagaaccaaatttgtgaatctggtatgtgagaaagcaagtgcagaagagttgatatatatgatgatgattacatgtttttttattttgaatattgaactc

SEQ ID NO: 219 - DNA, 1622 bp, Glycine max
gctggttacactttacacatgcgaaccttcagcgaagctaagcacgaggaccccaacacaagggaaaaaagcaataaaataacactaaccaataaccatcaataaaacaaaaaatctaaaaaaattcaaacgataaatgcaataaaacccaagtgcatgaacctacactcctataaatacctcctaattcacagccccataagttcgaatattcaatacctcctcttccaaaatatccacgtttcttttcccacacactatcttaaatcttaaaaacattttttttttcaaagcaattagaatttagaccacaaaaggaacaccgaagagatgtacggacagagtagtagtagcagtagttcttacgaatcggatttggcgctgttggattcgattcggcaccacttgctgggcgagtccgaatccatattcggcgccccgaatttcgggtcgggtcggagctccagtttcagcagcttggactcgtgtttgagcgacaattggggcgagcttccgtttaaggaggacgatacagaagacatggtgttgtacggcgttctccgtgacgccgttaacgtcgggtgggtcccatctctcgatgccgggtcgcccgagagcgtgtcgtcgggttttccggcggtgaagctggagccggacttgatgccggcgctgataagtccgtgtccgcctccggcggctgcggcggaggagaagaaggttgttccggcgaaggggaagcactaccgcggcgtgcggcagcggccgtgggggaagttcgcggcggagatccgcgacccggcgaagaacggagcaagggtttggctggggacgtttgagacggcggaggacgcggcgttggcgtacgaccgcgccgcctaccggatgagggggtcgagggcgttgctgaattttccgttgagggttaactccggcgagcccgatccggtgagggtgaagtcgaagcggtcgtcgtcgccagagagtgcggcggcgctgccggcgaagagaaagaaagttgtggtggtggggacggtgcaagagcaagtggggagtcaagtggcagagtgtacacgtggcgagcagttattggttagctgaggtggattctaaaactggtgttgtgtttattaaatacaataaatacaatacacttttgtaattatgtgatgtgcgtgtgtgtgtaaagcacttagctatattatagccatcatccaactcaattttggaacaaagaaaaaaaggtgaaggatgaggatagatgattttagcacatcaaatggtgagtggtgtgaccccacgggaagaaaaaaaaaaaagagggggagaaaaaaattcaaagaagttatggaatttggaagatgatgaggaatgacgggggtgaggaactgaggatatgtaatttggctttgtgaatactaccaaatttgttatttgtttgttcaacattatgaactatgaatgggttaattgttaattgcttgatattcggagttgaaaagcatggcaatatgcaataaaatgcatcaaataaaaatagtaacgccaatgattgaaaatgtaatgaaagtaacaatttaatggctatgttgtggtaacattaatgaaagtaaaattttgacaga

SEQ ID NO: 220 - DNA, 818 bp, Glycine max
tttccattcgttcaccgccccaatctctgcagcgccttcgatctagaaaacatggtactctctctctctcttctctttcacttccaccatcacaattagggtttctattgtacgtcgttttatgttgacactgccgcgttttgtttttgcagactaagagaacaaagaaggctggcattgttggaaaatacggtacccgttatggtgccagtctgcgaaagcagattaagaagatggaagttagtcagcacagcaaatttttctgtgaattttgtgggaagtatgctgtgaagaggaaagctgtaggaatatggggatgcaaggactgtggtaaagtgaaagcaggcggtgcttatactttgaataccgcaagtgctgtgacggtacggagcaccatcaggaggttgagggagcaaactgagagttgagctttttgttgatgttatcaattactattagactttgcgtgatatgcctagtttgtgttcactgaactgcattggttgtattcaaagtaaactccttaaagtttaattttgagatgactcttttaattttagttgtttggaactctttgtcagagtgattttgcttcatagttttattttattgttttcaattctagtggttcattgtttctcttcatgcttgttaagatggatcttagcttacctcgcaaaagcttttccttaaatcttctagggctattttatgcctgatggtttacttgtgttcttgatggtgtatgtatttgttaacgattctagcgaattagaggttgcattaaaaagcattaaaaattgaatgtgaagctttcg

SEQ ID NO: 221 - DNA, 822 bp, Glycine max
atgggaagacagccttgttgtgataaggttggtttgaagagaggtccatggactattgaggaagatcgcaagcttgtgaatttcatcatcaataatggtatccactgctggagaacagttcccaagctagcaggcttgctaagatgtggaaagagctgcagattgagatggattaattatctgaggccagacctcaagagaggtggattcactgaaatggaagaggatcaaattatgcaactgcattcgtgtcttggtaataggtggtctaagattgcttcacattttccagggaggacagacaatgaaatcaagaaccattggaacacaaaaatcaagaagaggctgaagctccttggtttggaccctttgacactgaagccagctgagcaaaaggaaaagtcgggtgatgacataaaaaatatagaattacaaccaaacacttcaaaagggtctgaacaaggtgtggagaacaaatccttggacatgcatggcacaagagaagtggcaaaaacagaagggaaaattgaagagaacgaggtgacatgggatgataccactggaattttcaacaattatgaaatgctgtgctcacagttggacttgggatcatgggtgagccaagaaaccaaatccagcactagttcttattgtagttcttctttctcacttgatgattctagcaaccattctgtgggtgaatcctcttaccttcaggaaaattccttacagcaatgggttgatgatttggattccattctgtcttgggataacttcaattctcttgagaaagattttctcttcttggataataggcaataa

SEQ ID NO: 222 - DNA, 1186 bp, Glycine max
atggatcatcatgtcataacatggattctacccgtcgctcgatgggaattgcgcttcaaggcgtctcgcaggactaatctgcctaacgacggtcaccaacggcacgtgcctttggggggccgaggccccctactgctggtcggcaaacggacgacgggcgcacgcgtcgcttcttgcccggattctgacttaaaggcgttcagttataatccaacgcacagtagcttcgtgccactggcttttcaaccaagcgtgatgaccaattctcgtgttccctattggtgggtgaacaatccaacacttggtgaattctgcttcacaatgataggaagagccgacatcgaaggatcaaaaagcaacgtcgctatgaacgcttggctgccacaagccagttatccctgtggtaacttttctgacacctctagcttcaaattccgaaggactaaaggatcgataggccacgctttcatggttcgtattcttattggaaatcagaatcaaacgagcttttacccttttgttccacacgagatttctgttctcctcatcttaggacaccagcattatcttttaacagatgtgccgccccagccaaactccccacctgacaatgtcttctgcccggatcgaccggccgaagccgaccttgggtccaaaaagaggggaagtgccccgcttccgattcacggaataagtaaaataacaggccccatagggcccgttcccaatccgtcccccgaccggcacgcaacgacccactctcgctgcgaaagcagctcgagcagtctacctacagccgacgggttcgggactgggacccccgtgccctgccctcagagccaatccttttcccgaggttacggatccattttgacgacttcccttgcctacattgttccaacgaccagaggttgttcaccttggagacctgatgctgttatgagtacgatcgggcccgctggaccctacctccggctgagccgtttccaggccgccacgtcccggttcaggaattttaacacgattccctttcggagtacgcgcacagagcgctatcagacgggcttcccccgtcccttaggatcgactaacccatgtgcaagtgtcgttcacatggaacctttcccctcttcggccttcaaagttctcatttaaatatttgctactaccaccaagatctgcaccg

SEQ ID NO: 223 - DNA, 627 bp, Glycine max
atgaacttagtcgatacaaagctatatgatagcacttccatttttttgattcggcaatatgatctatgctatgatttatcattcatggacgttgataagatccttccatctagcaacaccttaggatggcacagccctaaagttaatgtcgaggttcaaatgaaaaaagacttatggtggatacctgggcaccccgagacgaggaagggcgtagtaagcaacgaaatgcttcagggagttgaaaataagggcaagagacaacttggtgaattgaaacatcttaatagccagaggaaaagaaagcaaaagcaattcctagaatgctgcaccctagatggcaagagtctagtaaccaaaagcatcactagcttatgctttgacccgagtagcatggggcacgtggaatcccatttgactggacatttagggataaagcactatttcggtgcaggccacgagagcggtaccaaatcgaggcaaactctgaatactagatgtgtcctcaaaataacatggatcagggggtgcatagacaaccaagaggtttgcctagaagcaaccacccttgaaagagtgcgtaatagctcactgatcgagcgctcttgcaccgaagatgaacaaggctaa

SEQ ID NO: 224 - DNA, 655 bp, Glycine max
gcagttcgagtccgcttatctccaactcatgaacttagtcgatacaaagctatatgatagcacttccatttttttgattcggcaatatgatctatgctatgatttatcattcatggacgttgataagatccttccatctagcaacaccttaggatggcacagccctaaagttaatgtcgaggttcaaatgaaaaaagacttatggtggatacctgggcaccccgagacgaggaagggcgtagtaagcaacgaaatgcttcagggagttgaaaataagggcaagagacaacttggtgaattgaaacatcttaatagccagaggaaaagaaagcaaaagcaattcctagaatgctgcaccctagatggcaagagtctagtaaccaaaagcatcactagcttatgctttgacccgagtagcatggggcacgtggaatcccatttgactggacatttagggataaagcactatttcggtgcaggccacgagagcggtaccaaatcgaggcaaactctgaatactagatgtgtcctcaaaataacatggatcagggggtgcatagacaaccaagaggtttgcctagaagcaaccacccttgaaagagtgcgtaatagctcactgatcgagcgctcttgcaccgaagatgaacaaggctaa

SEQ ID NO: 225 - DNA, 3677 bp, Glycine max
actcccgtgttggcagatccaataaaagcaccaagccgacacttttctctctgttctcctctctcattctgtcattttctcttgactccttcacttcacttccccatcatcttttcacttctttctttgagtctttaccttttttcctccctcaccaaacacactctctctcactctacaaagaaagctgagctggttgtgggtgttgtggccgcctcacactctcacttcaccactctccgcgctggtgagagatcacacatcatgtgcattttccttccaattcttgatgtctgaactctaaaccttttaaccttcaaaactcttcagctctcaaaactcatcactcttattcaccctttttatgttccaaacattttgtgtctcctgaacacagttttgcagcacaccattgctgttcagttattgttgtccttttggctctttggatgatccattccatgcacaaccacgacctcaaactttgttcatagaggttcctccctgttaaagcttttagcaatatggatcaaaaaacgtggctttggagaaaaaaatcctcagaaaagacaattatagctgctgacaacacagatctcagttcaaaagaaaatgaagaggttcaggcacttgtagctgataaagaagaattggagaaaaacttgaaaagattaaataacaagcttacttcggcactttctgattgtaatgctaaagatgagctggtgaagaaacaaacaaaagttgcacaagaagtaatggaaggtttgaagaaggcagaagctgaagtgttgtctatgaagcaagatctggatgaagcattgcagcagcgtttagtttatgaagaaagagtagtccacttggatggagctctcaaggaatgtatgcagcagttacgatttgttcgagaagaacaagggcaaaggattcatgatgccgtgatgaaggcttcaaaagaatttgaaaaggagcgcctagttctggaggaacagttatctgagacaagtaaaaggcttgcaaaagctgaggctgaaaattctcatgttaataagtccatatttgcaagagaaaatttgattgaagatctgaaaagacagttgaatcaagctgagacagatcactgtgctctgatgaatagattagagtccaccgagaatgataatacctctctgaagtatgaggttcgtgtacttgagaaggaacttgagatccgaaatgaggagagggaatttaactgtcgaacagctgatgcttctcacaagcagcacttagagagtgttaaaaaaattgctatgttagaatcagaatgtcagaggctgcgccttctggttcggaagcggttaccaggtcctgctgccctggcaaaaatgaaaaatgaagtggacatgttgggacgggattcatttgaaatcaggaggagcaaactgagctcaaccagttcagtggttgaatcttcagttgacacttctcctgagactcccattagaagaatcaacactttgaatgagcagttatatactatggaagaagaaaacaagactttaaaagaatccctgaataggaaaatgaatgagctccaattctcaagagtaatgctttctcgcacagcttccaaacttttgcaacttcagtcgcagattgaagaatcgtctaaagctcacataactgtggaacagctaagaagttacctcacatcacatgagttctctttggcatcaatgtctgatgctggcagcgatgacaaggctagctgtgcggaatcctgggcttctgcattgatttcagaattggagcactttagaagtcgaaaggagaaggaaccattgtcatgcaaaagtgttggagcttcagacatagatcttatggatgactttgttgaaatggagaaattagcagtggtctctgttgaaagaggcactgaaatctcatctgcttcttttaaagccgttagtgaaatcaatggcttctcagagactgggacaaaggataccactcctgaagtagaaggtaaggagatcattccagtgtctgatcacatttcaactgcgacaagtgagaccatccctgaagtagtaggtatggagatcattccagtgtctgatcatatttcagacctcccaaagtcaaataaaaaaacctgttccattgacatattgacgggcaatagtcctggttggcttcaggatgtagtaaaaatggtcttggaacaaacccatgtcacacacaaaagctctgatgatatactcgatgatattagagtagctttgaggtatgtgaacaatcctgatctgtttgactttgattcaagcaaagactctggtcatattgacacccaggatcctccccagtgtattcattgcatctcatgttcaaataattctttggtggcttctggtgatgaaaataacactggcatcttgtcaataaagagaatcacactacaatctcaggaagatctgagtaaatcaattggaaagataattgagattgttgaaagaatctgcctgccttctgtggactatgatagttcagatcccttgcacgaaggagatggggatatcgtttcatacaagaatgtaggaatgccaacaggctacatggttcgtgttttccagtggaaaacatctgaactcagtaatgttttacggcaatttctacatgtgtgttacgatttactgagtggcaagactgattatggaaattttgccaaagaactaacaatattattggattggattatgaatcattgcttttcacttcaggatgtttcgagtatgaaggatgccatcaagaaacaatttgattgggatgagacacagagtgaaggtgagacagagaatgagataagtcattttgcagaggaagacaagttgcagtttccaagggaaaactcgtcatctttgcctcaagtaactactttggatggtcatgatcttcagaatggagagatatattgtaaggagaaagaagaacttacaaatattaaagacaaattgatcagtgcagaatctcaaaaggaagtcttggaagggaagcttcaatcagctactgataggattgaatccttaatgaatcaactccaggaatcagataaaactattgacagtttgagattggagatacattcctttaaagaatcaaatggaaaacttgagaatgaaatcagaaatcagaaactgataatttcaaatcctgatgcacaacattcagaagaagaattaaaagaggctcgtaacaaggttttggctttagaagtggaactggagaaaaagaacagcaattgtaaagaactagaagccaaatgtattgaattgcagttccagcttgaaagcatgtcaaaggagtgctcaaaccatgatattattgagaaagataagccactgcataatgtaagttcatctctttctagtcctttttcttgtcaactcctagtcagattactagttcttatgtaactttcaagaatatttaattaaggtgaaccgtgatttctactaaaacaaagttagaacttatagtatttggacttatgtgactttaacttgccttttaaattacaaactggaaataccaatctggagcatgtaaacattgagcaatgtatccaatatacaaagctgaaatagatgaagtgtggtgttgaagttgcacataaaatgggctgggtatatctatat

SEQ ID NO: 226 - DNA, 303 bp, Glycine max
atggacttggaagggaaaaccgtcaagctgcagatagtgagtattctcaggaagttcgagattccgtccatgtctcacttgagactctcaatgaacgaaagtagcaagccttcatttaaatggcgaagggttttgctcaaagttagcggagaagcacttgctggagaccactctcagaacattgaccctaagataaccatggccattgcaagggaggtggcagcagtgacacgccttggcattgaggtgactacaatggattcttttattctaatacttttttgtttcttttcatattcatag

SEQ ID NO: 227 - DNA, 303 bp, Glycine max; identical to SEQ ID NO: 226

SEQ ID NO: 228 - DNA, 1537 bp, Glycine max
cagaattttttcttctattgaccgggggaaacctggacttaaaacggagatccactgcaaatcgatcaaaacagaaacataaagtgagagaacaccaaatcaaacgcaactcgagatattaataagcttcttcttcgtcagttattaccattcgtggaagagaaaaagaaaaaagtaactaaaaaaataaactgtaataaagagtccaaaatgaaagccaaaacggtgaaaggaaattggagcttgaggacgaacaagctcagcttcccttacgtcttcctcgtctgcatcttcttcttcctcgctggattcttcggtttcactctcttctctcactctcagggcgatggagatggcttgaggccgaggcagaggctgcttgaaccggggaacgaggcggagtacaatttgatgcctgttagagatcttggcgatgattccattacatcgattccttttcaggttttgagctggagacctcgagcactatattttcctaattttgcaactgcagaacaatgtgaaaacattattgatgtggcaaaggatggcctcaaaccatcaaccttggcgttacgccagggagaaacagaggagaataccaagggaattagaacaagctctggcgtgtttgttagtgcttctgaggataaaacagggactttagctgtcattgaggagaaaattgctagagcaacaatgattcccagaagtcatggagagggtgattttaaattgtctgaggaatcaccatgtttcaggcatttaatatcctacgctatgaggttgatcaaagatataattctcattatgatgcgttcaatcctgctgaatatggtccacaaaagagccaaaggatggcgtcatttttgctatatttaactgatgttgaggaaggtggggaaactatgtttccatttgagaatggcttgaacatggatggtaactatgggtatgaggactgcattggtttaaaagtaaagccacgccaaggggatggtcttctattttattcattgctcactaatggtacaattgatccgacatcactccatgggagctgccccgtgataaaaggggagaagtgggtggctacaaagtggataagagatcaagaacaggatgattagatgattggcacctgcaatcgagattcgaattccgacatccatcgtagcaattctgtctcataagcaaggtcgtcatcttccatacagtttatttttatatggtcagatgaataatcaagggctaaattcaattagatgctgaaattatgtaacactagtacaaaatttgatagcatgaacgcactactagctgaccattaaattgagacccacattagtcattacccttcacttttgcattactctcttgatctctcatttaagagcgttcttgtctactgtcttaggatagtgttttcttttttaaaacagttatttgatactatctccttgatacgcaccatgggtcaagtagttgattaatattaattagatgttaatttaattagttaacttaattggttaag

SEQ ID NO: 229 - DNA, 1505 bp, Glycine max
cagaattttttcttctattgaccgggggaaacctggacttaaaacggagatccactgcaaatcgatcaaaacagaaacataaagtgagagaacaccaaatcaaacgcaactcgagatattaataagcttcttcttcgtcagttattaccattcgtggaagagaaaaagaaaaaagtaactaaaaaaataaactgtaataaagagtccaaaatgaaagccaaaacggtgaaaggaaattggagcttgaggacgaacaagctcagcttcccttacgtcttcctcgtctgcatcttcttcttcctcgctggattcttcggtttcactctcttctctcactctcagggcgatggagatggcttgaggccgaggcagaggctgcttgaaccggggaacgaggcggagtacaatttgatgcctgttagagatcttggcgatgattccattacatcgattccttttcaggttttgagctggagacctcgagcactatattttcctaattttgcaactgcagaacaatgtgaaaacattattgatgtggcaaaggatggcctcaaaccatcaaccttggcgttacgccagggagaaacagaggagaataccaagggaattagaacaagctctggcgtgtttgttagtgcttctgaggataaaacagggactttagctgtcattgaggagaaaattgctagagcaacaatgattcccagaagtcatggagagggtgattttaaattgtctgaggaatcaccatgtttcaggcatttaatatcctacgctatgaggttgatcaaagatataattctcattatgatgcgttcaatcctgctgaatatggtccacaaaagagccaaagggattccgtagaggaaagagcaaaatggtgttattatgtgggcctgggttcaattaaagtttaagctgatctagttaaaactacgatgtactgattgatgtgctagcttttgaatggtgaaggaacgttttcaatctcaagattagaaaccaatgaagcttttaacgtgggtccttgaaatgtggcatagtatgcagtttatcaatgctgtaattcgttttgagttgcttgtactcgcctcaatatgatataataatattgttcttagtagattgctttttctactttttagctcttgaactagtgcaatctgtttcttttagaataaatgttcattttgtttctctaaatatacaagtgtttgcaggttggtccccaattattatgtcatagttgtccttaaatgtcaatttatgccatgaaattgctcttcaaacggccatcaaattgacacttacaatgaaattaatggcattaattctcaccaaataacctttcttttggtgcaactgtgacaaaggtttgaacctaatggcctcatacaaactattcaaacctctcaccactagctcaatcccaatggtttactaagactatgttcggcaagacatttcagcaagtttctagtttttttactagttgaaaaact

SEQ ID NO: 230 - DNA, 1393 bp, Glycine max
ctcctctcctccatcacctctagtttcagaaaacccccgtcactctgctcccttaattaattagccaccatgctctccgccctcactccttccgaccccttctctcccttctcccccttctccgccggcttcacgccgtgggatgacaacgacgattcccacgccctcttctcccccaaaccggtctctgcttctagctccgcctctgactataaatccgaaccgaacccaaccgaacacgtatgcgcctcgtcctcggtgatgatggacgagcggaaacggcgccgcatgatatcgaaccgggaatcggcccgcaggtccaggatgcggaaacagagacacctggagaatcttcggaaccagttgaacaagtgcagggtcgaaaaccgggaactcggtaaccggttgcagttcttcctgcaccacctgaaccgcctccgaaccgaaaacgaatggctccgctccgagcgaaccctgctacgccaaaaagtcgccaatttaacacaaattttgattttccaacaattccaaaccaccttctcccctgctgcatggaccacatgcaccaacaacaacaccacctcgctcatgacaattaatcaagttaattaattaaataatatatatatatatatatatatatatatatatatatatatatatatatatatatataaaataaggtcttggtaaaaactctaagaggcctaaggtgtcctatgtaattatcattaaaagtttagataaagagatatattctagatggtaaagggtgggatttttggaaaaatattaggcctggttttggaaaatattagttcatttttttcaaaaccataagggttattatatattaccgattataatatatttgtgtaaaatagtagctttttctttttttgttattctggtatacgatttacttatttttttagttgttaactcgtgatagcttctttatcaaaatcgcttccctgactttctttatcatgcacgactcatactggtgcttcagagtccaaattaagtcaaaactaatgttaaatcaaactcactaattaacaatatactcctatatttttacaactacagcagttaatgataacataccgagaaaggaacgaaggaaaaaaaatggaaactaagtctgatcaatgcaggtaaaaaattcgtacaaagtatgaataaataatatataccaccgacatagtaaaagtaaaaaaaaaggtattgcttgtaaccgcagtccttctgtttcatttttatttgggccgatgatacaataatactatatcatattatttgctggcgaacgatagaagcgaaaataattggtcaagccatgaattccatatgatcgtccccttctaatgaagtttaattagggttttgg

SEQ ID NO: 231 - DNA, 444 bp, Glycine max
atgaatttgagaagcctagtgtttgcagagtctgaaaagctgagattggatcacatatattatctgattctagggttaaattttaattcactctactgtctgactctctcgctcacgcctagcacgttttttttttctcttgctcactctactccgttcctttcccaatcgccactcaaccatcaccattgcgactcacgaggagactcagcctccacgaccgacgttccctcgacatccttcaacaaagttttcggcatttgtttgaggctaacttacttgcacgaggaaattaagccaaaagttgtacatcgagatattaaatcaagcaatattctaattgatgatgacttcaatgccaaaatatttgactttgggctggcaaagttattgggtgttggaaaaagtcatatcacaactcgagtaatgggtactcttgggtaa

SEQ ID NO: 232 - DNA, 444 bp, Glycine max; identical to SEQ ID NO: 231

SEQ ID NO: 233 - DNA, 944 bp, Glycine max
tgtagcttggaaaacatgggcttttcttgcaaaatgtgaagtgttgtcttttgcagctagagatatgaattttgtgcaactggtgcgaattcaaatgagggtacctgaatatgggtggacgacgcagaaggttttccacttgatgaattttgttgtcaatggattgagggctgtccttttcggtttatacagaaatgtttttgcaattagaccaaaggcactagagcaggtgctaatggaggttcccggtcttctgtttttttctacttatgcattacttgtcttgttctgggctgagatatatcaccaggccagaagtgaaccggcacagaaacttaggccatcttattttatcatcaatggttttatttacttgatacaggtctgcctctggatttacatgagtgtaagcagaactgcagctggtttgggagctgcaaaactcttccttgcagttatatcattctttgctgctcttggatttttattgtatggtggaaggttgtttttcttgttgagacgctttcccattgaatccagaggccgtcaaaagaaactttacgaggttgggtctgttacaagtatttgttgcacttgtttcctgataagatgtgctttgcttgcattttctgcatttgatgagaatgcagatcttgatgtcttggaccatcccattcttaacctagtgtactatttgttggtagagattgttccatcaacgttggtgctcttcatattgcgaaagctgcccccgagacgagtttctgatcagtaccaccccattagatgagttgtgcattttaaatcctctcagaagccaacattctgttcctttttttttccttttcaatagatcttcttcatcagtctgagttggtgcataactgttctgtatatccataatttcatttattcaattagtgccgtttattctctaaaataca

SEQ ID NO: 234 - DNA, 246 bp, Glycine max
atgtggcatcccaaaaaagcaaacacaaagtatgtcgaggtatatgctggggaagatcccctttccccactttctccttcacctattataggcactaaagagctacatgcttccctcaattatttgagcaccattaagtcctcatacagagttttaagcttctatagttgctctcatatgcatatttccagagccactcaaaatgattctaaagtcagatccaggaaggtgtttgcatcaagctaa

SEQ ID NO: 235 - DNA, 1964 bp, Glycine max
gaaaatatttgaccaatgggcatgtattctgcatttgttgtcccatcatattacaggtgtctcaaatcccaataaatccaaggaagaacaaaacacgaaatgagaggccagagcctgaagtattctcttgtcttgtgatggtcttttgtctataaataaatccactttgaacctgttactatgtgcctcctcaaacacagccttgaacttgaactatcgtgtcttcttggctttctctgttcaggatcaacatggatattgtatcacgagctttgctatttccgttggctatacttgtgctcatattaagcacaccttgctcaggtgcttttgggaagagtggaactaatgtgaaaacagctatttttctgtcccccaagtttgaacttggaccaggatcggtagccaataaatatgattatgacgctgattttccaagaggtcatatagcacttaagagtttcaatgctgaagtagttgatgaagcagggaaccctgtgcctcttcatgaaacttatctccaccactgggttgttgtaagatactatcaacctaaatatgtgacgacacacacaaactatgatggacataggatacttcacaactctgaccatatatttgtgaggaacagcggcttatgccagagagatactctaggacaatactatggccttggatctgaaacacgaggaacagctacggatgttcctgatccttttgggatagttgtaggtgatcctgcagaaattccagagggatatgaggagaagtggatggttaatatccacgccattgatacgcgcggcgtggtggataggatggggtgcactgagtgtaggtgtgacctttacaatgttacaaagaaagaacatggggagcctctaagttcagactataaaggaggttattattgttgttatgatcaaacccagtgcaggttgagggaaggctttgagggcccaaagaggagcctctacctaagatacacagtgaagtgggttgaatggaacaagttcattgtgcctgtaaagatttatatacttgatgtcactgatactttaaaaatatcagatgattctagtggaatgatccctgagcatgattgcaagaccgagtatgaagttgaatcttgcagcactggccaaaagaatggtaatggctgtcttgatgtgaagagaacaagcctcccaatgcaaaagggtggttatgtcatatatggtgttgctcatcagcattcaggtgccactggatcaactctctatgcacaggatggaagggttatatgttcttcaataccaaggtatggaaagggaaaggaagcaggaaacgaagtagactacattgtaggaatgagcacatgttatcctcaaccaggttctgtaaagataattgatggtgaaactataactctagagtctaactacagcagcagccgtggccacactggagtaatggggcttttctacctattggtggcagaacagcttccacaccaacacttcagatattcttctcgttcttcattttttatgaatataaatagtataattcattgatagataagttgtgagatgcaaatataagttgagtgtcatatcgatggtatcacagtatgtatcacggttaaaagaaatacagaaatacatatcgatggaacatatacttctcatattcggcagcaataggacaacacacgcaagaaccggcaaagagcatattttcaagtttaaggattgtagtaatgtgattatcaattatttgtattggtgagggtttgtaatgtttgtcttaaaccagtcttgcttattatggttgtgtgatatgtaatactatatatatcatgtttgttgtaaataaagtggtcttatataactagaagagagaataaatcaagctgttcgacagggacatatgttctatcctacgtcaggccaaacgaggttttttttggaaaataaatcaaa

SEQ ID NO: 236 - DNA, 3001 bp, Glycine max
tgagattttttgtctgctagcttccaagagaaaatagtgctcacattcttctcatctgtgtttcagttctgttacgttcttcgtttcctgtgaaaaccttgcatgtgttcttctcatctcttagttttcaacactgagcctagttatgtgaaaattcagatgggttctggtttttaacccctgacttggaaggaacccaaaaaaaaaacgatttttttgagaactcactttggaactttcagtggcaagtagcagattatgctacaagagatatttttgggtagttgggatccgtggttgcaataggcatggatttcaagtgagttcagattgaaggcctgaaggttttgctttgctgtgtgtttttcttaaggggtggaggaactcttgaaaagggagattataaggctgcatagctgttactgcttggaacttgcaagttattgaactaagctcaaaatgggttcgagagtagatactgatgaagatagtgataacagaggtagtatgtgggatttggatcagaagcttgaccagcctatggatgaagaggcaggaaggctcagaaatatgtacagagaaaaaaaatcttcagcattgttgcttctgcggctagcatttcagagtcttggtgtggtttatggagacttgggcacttcacccttgtatgttttctacaatacatttcctaatggagtgaaagatgaggaggatgtaattggagcgctttctttgattatctactctcttaccttggtgccactcctcaaatatgtttttgttgtattaagagcaaatgacaatggccaaggtggaacatttgcgctttattccttgctttgccggcatgcaaagataaaaaccattcctaaccagcatcgaaccgatgaagacctaacgacatatagtcggtctaccttccatgaaaaatcttttgctgcaaaaaccaaaagatggttagaggaacaagaatctgcgaaaagagccattcttattcttgtccttgttggcacctgtatggttattggagatgggattcttaccccggctatatctgttttatcagctgttggtggcatcaaggtaaatcagcctcggatgagtagtggtgtagtagtgctggttgctgtggtaatattagttgggttcttcagcatgcaacattatggcacagatagagttagttggctctttgctccaattgtccttctttggtttctcctaattggaggtataggtatatttaacatctggaagtatggaagcggtgttctaaaagctttttctccggtgtatatatatcgctattttagaagaggaggaaaggaaggatggacttcccttggtgggatcatgctcagcataactgggacagaagctctttttgctgacctagcccattttccagtctcagctgtacagcttgcatttactctagttgtgtttccttgccttcttttagcctattctggtcaagctgcttaccttatgaataacttgacccattcacaagatgctttttatcgttcaattccagatagaatatattggccagtatttattgttgcaacattggcagccgtagttgcaagccaggctacaataactgcaactttttcaattattaagcaagcccttgctcttggatctttccctagagttaaagttgtgtatacatcaaagaaatttcttggccagatatatgttccagatattaattggatccttatgattctttgcattgctgttacggctgggttcgaaaatcaaaaccagattggaaatgcatatggtactgcagttgttatagtcatgctggttacaacgatccttatgattttaatcatgatactagtgtggcgctgccattggattctcgtcctcgtcttcactggcttatcattgattgtggaatgcacatacttctcctcagtactcttcaaagttgatcaaggtgggtgggttccacttgccattgctggagcatttcttattattatgtctgtttggcattacggcaccgtgaaacggtatgagtttgaaatgcatagtaaggtctcaatggcatggattcttggtcttggcccaagtttaggacttgttcgtgtccccggaattggactagtctacacagaacttgcaagtggagtgccccacattttttctcatttcatcaccaacctaccagccattcattccgttgttgtttttgtatgtgtgaagtaccttcctgtctacacagtcccagaagaagaacgattccttgtcaagaggattggacctaagaatttccacatctttcgatgtgtggcacggtatggctataaagatctgcacaagaaagatgatgattttgagaaaaaactctttgagaaccttttcacattcgttcggcttgagtctatgatggaaggatgttcagattcagatgaatacagcttatatggacagaaaatagagcatccaagagatggccttttgcataacaatggaagcacagtttcttccaatatggatttaacaatgtcctcagtagattcaatagtaccagttagatcaccgcatcacatgaatattactgtcaggtcttctggtcaaacaagcagccagaccgaagttgacgaatttgaatttttgaatacctgcagggatgctggggtggttcacatactaggaaacacagttgtgagggcaaggagagaatcaaggttctacaagaaaatagctgttgattatatttatgcatttcttaggaagatatgcagggaaaatagtgtaatcttcaatgtccctcatgagagtctcttaaatgttggccagattttctatgtatagatagccccatatccttgtgattgccattttttgcaaaatgagctgagtgtagcacatgaacaacacttagcttatggtaatcaagtgttacaattcggagatgtcttagaagaatggctttttggcaattatctcttaaaaattgaaagtattgctcccatatggc

SEQ ID NO: 237 - DNA, 1308 bp, Glycine max
atgtggcctacattagtggctaataagatattcaagaagagacttggaagcagcaattttatagcagattttcctagttataaagaacccttgctgggtattgtagacattgatcagaactcaaaaaccattcttaatgatcacaaggacacacacaaatacaaggtatttgttagtacatggaacgtaggtgggattgcaccggatgaagatttgaatatagatgatttgtttgagacattcaacaactcttgtgacatctatatactagggtttcaagaaatagtgcctctaagagcatcaaatgtattgggctccgaaaacaatgagatttctatgaaatggaattcaaaaatcagggaagccttgaacaagaaaacacatcaaaggggcaaagatgctaaaaaacaggagctaaagaaaaattttcccaataagaaagaaaatccagctaagtgctgtgaagccccacatgatttccaatgtatcattagcaagcaaatggttggattattcatatctgtatggattagaagagatctttgtccattcattcggcatccaagcgtgtcatgtgtaggctgtggcataatgggctgcttaggaaacaagggttctgtatcagtgagatttcagttacatgaaacaagcttctgctttgtgtgcagccatctagcttcagggggcagcgaaggtgatgaaaagtacaggaactctaatgttgctgaaattttttctcggacaagttttcctagaggccctttgcttgatttgcctagaaccattcttgatcatgatcatgtaatatttcttggagatctaaattacagaatttctctaccagaagaaacgacacgcttgcttgttgaaaaaagagactgggattccttattagaaaatgatcagctaataatggagctaatgactggaaacatgttaagaggatggaatgaaggagcaattaaatttggacctacctacaaatattgtccaaattcagacatttactatggatgttgctatcatggcaaaaaggcagaaaagagaagagcaccagcatggtgtgatcgaatagtatggtatggtgagggtctaaagcaacttcagtacactagaattgaatcaaaactgtcagatcatagacctgttaaggctatgtttatggcagaagtcatggttttaccagagctgatgaaaaacttgcaaagcttattcctatcagaaagatacgagcaaattaaaactccccttgaagtttccaccactgatgattttgtaaatagaaaacgatcaagcttccgattgtga

SEQ ID NO: 238 - DNA, 675 bp, Glycine max
atgggaagcgaagaagtgaagctgttgagcttttttgcgagtccatttggcaaaagggttgaatgggcattgaaactgaagggtgtggagtatgagtacatagaacaagatatcttcaacaagactagtctccttctccagttgaacccggttcacaagaaggttccggttcttgttcatgcccacaaacccatcgctgagtcattcgtcatcgttgaatacgttgatgaaacatggaagcagtatccactgttgcctcgagacccttatcaaagagcacttgctcgattttgggctaatttcgctgagcaaaagcttttagatgcagcatggattggtatgtatagcagcggggatgagcagcaaaacgctgtgaaagtagccagagaagcaatagagaagatagaagaagagattaaggggaagaaatattttggaggggagaatataggataccttgacattgcacttggatggatctcttactggcttcctatttgggaggaagttggatcgatacagataattgacccattgaaatttccagccatcactgcatggatcaccaattttcttagccatcctgtgatcaaggacaacttgcccccaagagacaagatgcttgtttacttccacagtcgcagaactgcgctttcttcaacttttcagggctga

SEQ ID NO: 239 - DNA, 1454 bp, Glycine max
tttgttcttctgaatggtaatctggttccatttattaaaccatttggctgtcttcttttcactttaaacagggctctattcatttaattagcatctcagtttcttatatggaggaaacaatcagaaaagcttggatacaatggtgaaagctactcgcagtcttactattaggaaaccgaatgaaagtatgaggcatattgtgttactttttgttggaggattttttggcttaattataggattatcacttccaccactgtcaataacaaagctgaatctaccatacggcctgcttcatctctcttgtatacaggaaaaatatatagatagcagcatcacatcccaagatcagtttccaagtgatgcaacaaagatttgggttccaacaaatccaagaggtgcagaaagattacctcctgggatagtaaatgcagaatcagacttatttttgggcagattatggggtcttcccagtgaggatttaacctttaagccaaagtaccttgtgactttcactgttgggtacgagcagaaaaagaatatcgatgcagctgtgaaaaagttttcaaaggatttcacgatccttctgtttcattatgatggccgaacaacggaatgggatgaatttgagtggtcaaaacaggccattcatgtcagtgttcacaaacaaaccaaatggtggtatgccaagaggtttctacatccagacattgtggtaccatatgactatattttcatgtgggatgaagacctgggggttgagaatttcaatgctgaagaatacctaaaactggtgagaaagcatggcttggagatatcacaacctgccttggaacctagtaaaagtaccaaagcggtgtgttggaatatgacaaggagaagagagcatagtgaagttcacaaagaagcagtggaaccaggaaagtgtaagtaccctcttctgcctccttgtgcagcgtttgttgagataatggctccagtgttttcacgaaatgcatggcgctgtgtgtggcatatgattcagaatgaatttgtccatggatggggtcttgattttgcctttagaaaatgtgttgagcctgcccatgagaagattggagttgttgatgctcagtggattgtgcaccaaggtattccctcactagggaatcagggagaagcacaaacaactggaaaaccggcatggcgagcggtgaaggagaggtgtggcatggagtggaggatgttccagggtaggttgactaacgccgaaaagggatattacaagtccaagggaattgatttttctaatttgctcgttcataattaggggacagcaccaaattcttacacatacatcgccagcgttgtttatgttttcgagatgattattttgacatatgattgttttattaatcttgtaagataaagtttggataaattattcaataaacagaagaagaaaaaaacaatta

SEQ ID NO: 240 - DNA, 2790 bp, Glycine max
cgagcgagtcaatactcaatacgcacaacaacgcgtggagaagagagactcagtaaaagtaaaggccaagactttatttataagcaaaagcgggacagagaatataaagaaagaaattagcagagagaaagtggaatccccaatcttgtaacggaactttttttcttatcagttccatagctagctgtgtggagacgacaactgccacccattccaacatacagagaggctatttactaattactgttcctcgtgtgaacaaacatataaaccacctcggattttgcttcctctgctgtgttttaacgacaacgcgtttctttgcttatacactaagatttcaaacggcgattcgttttgcgactgtgtggtcgcgatctggttttgttttgattcatttgtacgttggactgtgaaacacacgccgaaatgtggtggatgatgggcgagactggaggcaattactgttgtaagaagagcgatgatttgtgcaccaatgtttgtggtcaggtatatcatccataatttttttttttattaaatgttacttttccgtttatgtggtgtcgatgtaagttaatctttcagctgtggcttcggttcgcctatttaatttgtggatttcgttattttggagagaaaacaaaaaaaaagtcattttgaatggtttttccatagaaaactgtttatgtggtttgtcatgtaatctatcactggattgtgatgaaacttttgtcctagatttgctctttttaggtgttgtttgtttgctatttcttttaaaaaaaaaaaaaaattggtgtgtgaacgagattttcgtgatctgaatttagatatgggataaggttgtgttttttgttatttttttatttttatttttctaattttaggaaacctgccgaggtattttttgtggcttgtaagtgaacgcaaacgaagacacccttttttttccttcttgttcctattttttgggggattcgtttgggagggaaaggagtctcgtttatgttgtagccataattggatttgaatggatgcaaggtttctcgcatgaagagcttgcaatttggggttttttcggggcatggtttcttttttcttcatgatacagcttttggctttatgattaaattggggatttaagttatatgatgcttgaaaattttccccaatacagagagaggagcattgggtttttgataagattgtgaatcaagtcaagtatcaggtatgtcacgaattcgctgcattctgcggggtttggatgtgaaaacctacatattcatgtttgctgttatcccaatgtgtgtctttggattctatatacatgggcagaagatctcctactttctgcggccactatgggaaaaagcacccaagcctttcaatgtcatccctcattactataacgaaaatgtcaccatggagaatctctgcaggcttcatggatggggagtccgggagtaccctcgacgtgtttatgatgctgtgttgtttagtaatgagctggaaatactaaccttgcgctggaaagaattgtacccttacataactgaatttgttgtccttgagtcaaattctaccttcaccggattgcctaaggctctggttttcaatagcaatagggagcagttcaaatttgttgagccgcggttaacttatgggaccattggtgggagatttaagaaaggagaaaacccatttgttgaagaggcgtatcagcgtgtagcattggaccagctcctgaagatagctggtattactgatgatgacttgttgattatgtctgatgtggatgagataccaagtgctcacactattaacctcctgaggtggtgtgatgaagtaccctcaatccttcatctgcagctgaaaaattatctctattcatttgaatttcgtgtggatgataagagctggagggcttcaattcacaggtatgagactgggaagacgaggtatgcacattatcgccagtctgatgacatattggcagatgctggatggcattgtagcttttgcttccgccgaatcagcgatttcattttcaagatgaaagcctacagccattatgatagagtcaggttctctcactatttaaatcctgaaagaattcagaaggtaatctgcaaagggaccgatttatttgatatgctgccggaggagtacactttcagggatatcattggtaaaatgggaccaataccccattcctattctgcagttcatcttcctgcttttcttctggaaaattctgacaagtataaatttcttttacctggaaattgcaagagagagagatgatcttggaaagtcatttatgatactggcttgtttctgagcttctagcttgtacagctcaagtgactctcctctctcggaggtttttaactgaggttgtgatgattgtatgtcactcgtatagctgtaagctgtgtcattgtccagtgagatattctttgggaattaattaatttcagataaattctttgatcttgggggaattctgtatataatttagagctggactttcattcaaggggagcaacatctctactgatgaggactgaaactgctgttttgagaacgggcttgccttcatgaaatgtgtttatttagtattagggtgattgatccccggatatacgagactagtttaaaattccccactttttcctgtttgggaagttttgttctgcagaccaatttattttctaattattctttatttatgcaaatatctaatccgattggttggtctatattcataacagtgctgactcagtt

SEQ ID NO: 241 - DNA, 1324 bp, Glycine max
ataaccaggctcaaagtctcaagcccctcaaactactaatagaacactgtccaagagggccccttgatactgatgtggattctcccaatttgcttaaccctctagagtcgttcctttcactttttctgctacactctgcactctctctctctctctctctctctctctctctctctctacttgcttgctattgctgccaacacatcttccaatttatgtacctctcttctcctctttcttcaggctatacgccatgagaagaaaagcactactctacactggaaaataatagagtaaaaaagccttcttccttttgagttttgatcttctctctctctctctctctctctctctcttggttgggttcttcttcacatcacaacctgataaagtttcttcagaggactggcattcggatctcagttaactaaaattaaattttaccacccaagctagttttctcttttggatggggaatgacttcaaggggtggtgacatgatcatatgcattcatggcttcacttaattcatatcattactatacaaccacctccttgctcatcatacttcttctccatgatttgctctctctatctctagtttctgcctccaatcatcctcaatctgcaatttctccaagggaactgttatttggggagaaaaacaggctaggttcaattcctcccagctgtcacaacaagtgcaatgattgtcatccatgcatggcagttcaagtgccaactttgctaagtcatgactccaatcctccagatcttaccaaaactgctgcgatggcaagttttcttaacccttcttctccccaaggcaacaggtactccaattacaagccattggggtggaaatgccattgtggtgaccacttcttcaacccttagaaatttgtaaaacggccctcttattttttgttggttaaattttaatatttgtggcttaggggtcagctagggtaacagatttgcgtacgtcagcatggatcctatacgttagagcttgatacacttgtacagagtttgttacagacctcatgaatttcaactttattctgttgcatcttaattttgagaaagttgcctgttcctgcttttgtgtctgttaggatcatatcatttgagttattgtgtgttttgatactcaataatcctttacagttttatccttagaaggtatcttgtaagcaaaaaatcatggtccttcacggttttatccttagaaggcatcttttaagcacaaaattatggttcttcacggttttattcttagaagtgtcttttaagcacaaaatcatgacagaccactaagcac

SEQ ID NO: 242 - DNA, 567 bp, Glycine max
atggacttctactttggaaaccctcatccttatcccaatattcatcaatatcacgctcataattctgtagtcagcatgactccatcttcccctgagatcgcactatctgattatctcatgctcgatgactatgttgatcatcaagattctcgatcatcacaaagcactgagtcatcagaaaaagcaaccttctgtgatcccactcacggattcagcactggtgcaacctctaagaacaataacatgaagtgcaaaaatgggattaatgaaaacaaaagaggagtgggtccaaggatcgcgttcagaaccaaatcagagcttgagatcatggatgatggatacaagtggaggaagtacggcaagaagtctgtgaagagcaatcccaatctaaggaactactacaaatgttcaagtggaggatgcagtgtgaagaaaagggtggaaagggatagagatgactccagctatgtgataacaacttatgaaggtgtgcacaatcatgagagcccatttaccacatactacagccccatctccttcgtacattctgatactactttcaaatga

SEQ ID NO: 243 - DNA, 986 bp, Glycine max
ttaactcacactcatatataaaagggccaaatgctttacacaccatagtctttattttcaccagctaccatatttagttatcagcaatggacttctactttggaaaccctcatccttatcccaatattcatcaatatcacgctcataattctgtagtcagcatgactccatcttcccctgagatcgcactatctgattatctcatgctcgatgactatgttgatcatcaagattctcgatcatcacaaagcactgagtcatcagaaaaagcaaccttctgtgatcccactcacggattcagcactggtgcaacctctaagaacaataacatgaagtgcaaaaatgggattaatgaaaacaaaagaggagtgggtccaaggatcgcgttcagaaccaaatcagagcttgagatcatggatgatggatacaagtggaggaagtacggcaagaagtctgtgaagagcaatcccaatctaaggaactactacaaatgttcaagtggaggatgcagtgtgaagaaaagggtggaaagggatagagatgactccagctatgtgataacaacttatgaaggtgtgcacaatcatgagagcccatttaccacatactacagccccatctccttcgtacattctgatactactttcaaatgacaccatctccaaccccttttctgctcttacacctccctagcttaattatgtgccgagaaaaagcttggaagattcgatcgagcaagggaagctgtgtcaatgcattgtctaattaatcttaattattttcatgctgtaataggttgaagagagtttctttacccttctttttccattttgtttttagatgagtttaatatctcacttaatgaaaaatcaacctttgttagttcatgtgacaaagaacatgattttccatgtgtaaagttgttcaaatcttaaaatagaatggaatgcttcgtcttgttacagttaataaattcaaagttgttt

SEQ ID NO: 244 - DNA, 1299 bp, Glycine max
atgggaggatgtgcaactaagccgaaggtctcccaggacgatcccgatggaaagcccaaggcaccccaaccagaaccagaacctgaacctgaacaccaacaacccaacaacaaagacaccctgcaaaccaaagtaccccaagtggaacaaggtgctgctcacaaagaccacaacaaccttaatgtcaacgaaattgttgacgacgaccaagcaaacaaaccacgctctctcagctccttgttcaagcagaatgaagataaaaggggttccacagaaaatgagaaaaacaaagttgaggagtctgtgaaagaagaagtgttagaggtcaagaaacctgcggaagatactaaaagcaatgagccaacagttaaacaagaatctctaaagccagaggagaagctgtccgaggagagtaaaaacaatgaatcatcaaaacaagaatacgagactttgaaggcagaaactcatgtcaatgaaccatctaaggaaacagtgaaacgagagtcagaagctgagaaaccttcagaggaaactcatatcagtgaaccagttaaggaaacagagaaactagagtcagagactgagaaaccttcagtggaaactcatatcagtgaagcagctaaggaaactgtgaaactagaatcaaaagctgagaaaccttcagaggaaactcatatcaatgaaccagacaagaaaacagtgatagttgagtcagaagctaagaaaccttctgaggaaactcatatcaatgaaccagttaaggaaacagtgatagtagaagctgagaaaccttctgaggaaactcatatcaatgaaccagctaaggaaataatgatagtagagtcagaagctgagaacccttcaaaggaaactcttgtcaatgaaccagctaaggaaacagtgaaactagagtcagatgctgagaagccttcagaggaaaacaatcaaagcagcgagtcactgaaagaagaatttgtagaggccatggaggcaccttcagaggaaacacaaagcattgaacccatcaaactcaaagaagagcctattgaaccatcagaagaaggtaagccaagtggggaatcagagaagaatgcttcagaaactaagactctcattgtagagagcataaactctgaggtggctcctgtgcctgaggagagagtaattgaagaaattccaactgctgccaagtcttttgagaaggtaacaaaggaagctgcatcaagcacagaagagaaaagccataatggggtggagaatgcacctaaggctgttgatgctggcgctgagattcactaa

SEQ ID NO: 245 - DNA, 1903 bp, Glycine max
ggggaactactacatacaaactgtcgttttaaattgcttaacctttttgagccaaggcccagacagacaccgcatgctcttctctctcactaccattgatttccccgcacgttcctctcctaattcccctcctttttcgctactctttttcttttggggtgaaaactgaaaactagaaagaagcgtacggagagaaccaaagaaaacgaatccaatgggaggatgtgcaactaagccgaaggtctcccaggacgatcccgatggaaagcccaaggcaccccaaccagaaccagaacctgaacctgaacaccaacaacccaacaacaaagacaccctgcaaaccaaagtaccccaagtggaacaaggtgctgctcacaaagaccacaacaaccttaatgtcaacgaaattgttgacgacgaccaagcaaacaaaccacgctctctcagctccttgttcaagcagaatgaagataaaaggggttccacagaaaatgagaaaaacaaagttgaggagtctgtgaaagaagaagtgttagaggtcaagaaacctgcggaagatactaaaagcaatgagccaacagttaaacaagaatctctaaagccagaggagaagctgtccgaggagagtaaaaacaatgaatcatcaaaacaagaatacgagactttgaaggcagaaactcatgtcaatgaaccatctaaggaaacagtgaaacgagagtcagaagctgagaaaccttcagaggaaactcatatcagtgaaccagttaaggaaacagagaaactagagtcagagactgagaaaccttcagtggaaactcatatcagtgaagcagctaaggaaactgtgaaactagaatcaaaagctgagaaaccttcagaggaaactcatatcaatgaaccagacaagaaaacagtgatagttgagtcagaagctaagaaaccttctgaggaaactcatatcaatgaaccagttaaggaaacagtgatagtagaagctgagaaaccttctgaggaaactcatatcaatgaaccagctaaggaaataatgatagtagagtcagaagctgagaacccttcaaaggaaactcttgtcaatgaaccagctaaggaaacagtgaaactagagtcagatgctgagaagccttcagaggaaaacaatcaaagcagcgagtcactgaaagaagaatttgtagaggccatggaggcaccttcagaggaaacacaaagcattgaacccatcaaactcaaagaagagcctattgaaccatcagaagaaggtaagccaagtggggaatcagagaagaatgcttcagaaactaagactctcattgtagagagcataaactctgaggtggctcctgtgcctgaggagagagtaattgaagaaattccaactgctgccaagtcttttgagaaggtaacaaaggaagctgcatcaagcacagaagagaaaagccataatggggtggagaatgcacctaaggctgttgatgctggcgctgagattcactaaaacctgaaatctgaatgagagccatgaacaatttgaaacattgtagagtttcagattgttctttggttcatcccaaccgaatcattgtgtgagatttcccaactgcattttcctcgtgttattttttttcatatatagtttgaagaaccaattttttgttcttgtcaagtcactttttttctatcctatcattgcttatctgtattggtaggtcaaattcaccaatgtaaattgtaattttgttgggatccctgatctgcgagggggaattccaaggacctcaatctttttttctttttttaatattaccgtcaagtaatttgtgcaaaacaagtagtgtacgaatgtttcatgaatcaaactgagcaaaccagttatttttggttttca

SEQ ID NO: 246 - DNA, 3699 bp, Glycine max
aatgaatctggagagatccctctagcattcagtgtagagtccatcaccgtcactaataataaagttcctcagctcagctggcatgtgatatgatatgatactctctcaattctcatcatttcctttcctgaaaccttaatcttccattcccaatcccaaccaaactcgcctttttctctgttcgacttcaattaactgacccaccaccacgccacatacatactctgtctatgctcttcttaatttgtttattgttatcatacaaagtttgtagtagaacaacaacaactacttgaagcagttatagccgtagttccagttctgctgtgtgtctcaactcaaaaagaaaagttagctatgttatgtacatcaagtgcccatcatcattaccataattcacaaacctccctttctctctctctctctccttaaaaaaagcagattactttgcctgctattccgtgcaatttcccccttctaatttgactttgcatccccacaaaaaccatatcttttaataccataccatatggcaaaagagcaaaaccagggcaaaggccaagagagggaattggaactcgaaagtgacgagtctcaggctgagattgaagccccattgcctctcactgtgacttctcgggttttgtatatgttgggagatatcactgcagggcctgcgtttaggttcacgcaatggctccaattggttcgtaaacgcaccgcaaagtatcgttcttctggcttccctcaccgcacttccaccaccatgccttctagctcttgcatcagagaatcgttggagaattcaaaattggacctgcatcctgatcagacagaaattagcttgtgggagaggcttgggaaggctgcaatgttggacattgaatctggctccttttcctgggacatgctctcttcactgcaccacactgaacacagcagtagcaatgaacattccgaggatgagatgaacaaagctctcgaggtaactgtaaattctggaggagttgtcttctttgcctttttcaatatctctggaaatgctgatgcttgcccaaaagaagcagcagctgttataaagatagcatcatcaagaatggcaacacagtctgaacgccttggctatgaatttgccaagtggatgggagtccaaactccacagatgcagggtagagtcattcacaatacctgtttagaatggcaacaaataaaggaggctgcagaaaaagctagagaagcagcaaattctgagggtgatgaaattggtgaagtgacatgttttgaacttttggaagcacttgagcttagccgatgtctattttttatgagttatgtacatggttcacccttgcttgaaaattccagtgcatttgagtcaagggaatctgcagaaagaacatcagaagctcttggcagggtactgatgttggaccttgtcatcagaaacgaagatagacttccttgccatgagcttaaatggcgaggaaatcctgcaaatttgttgttggctggaaagaatatctgtgcaaatacagatgcactagaatcagcttttgattctgcagttaaccgatatagaccaaaggtgatcagggcatttcagaaagaaagaaggtcaacttcagtagattgcagactcaattctcataatcccggcttgatatcacaatcttatgatctctcagacatcacagaatcaccaagatctgctgacatgagctttcaaacatcaggagaatcactgtctcccgactttaacattgtagctattgattctggtgttccttggcgacctcctgctggaaaacgtgcaaatgatcaggttaattatcctaagttggttgagttgctggtcaatagttctgaatttgcctctaacctgttatatgatataactggggggaaattaggatgtcccccaccggaagacatggaaaaaacttatgtacatacaagtgacacaatgtttgtagttcacgcattccgtaatggtttccgtgctgctcttagagatctgcagggattccatatattcctactcacacttcaccaaagacttgatactttgttacgatcatttatgaacattattagcaaaatatctttgggggaatttgacaaagaagattctgtggttcctgactcactttcactgactgctggcgggagttgttcctctccaacatgtaaggaaaggcttgctaatgataaccatcaagattttattgattcagaatcacagagaactgcttcaagagcttcatcttcaggcaatagagattgcagtgactctactcctatgtcaagagaaacttggcatggaaagttctataaaggaaatggggaaccacttcgtagtctccgtttgactgctaagctccgtgacttccataaatttgccaaggttgatgctgaatccagtaaagaattggaacagtggaatgaaatgcttaaaagcgatgccatcaaactatgccaggagaacaatttcaacccaggattttttgagggtagtgataataactgtgtcgttgatgcatatgaacttaaggttagacttgagcatattctcgagagaattgcattgatatcagatgctgcaagtactgagaaaccttcagcagtgacaagtagtctgttcattggtggagcactggctgcaagatctgtatacacactgcaatacttgggaatcacaaatattttgtgtttgtgtaccaatgaaattggacagtcagaaactcagtatcctgatctatttgagtacaagaatttctctgtatgtgacagtgatgattataacatcagcagcatatttgaagaagcgtgtgatcttatagactttgttgaacaaacaggtcaaaaagttttagttcattgctttgaggggagaagcagaagtgtcacgttggtcctcgcttacttaatgctcaggaagaagtatactttatcacaagcatggcaagctttgaaacgagttcaccgtcgagcacaacccaatgatggttttgcaaagatcttgttagaactggatcagaaactacatggaaaggtttcgatggaatggcatcagcggaaaccagtgatgaaagtctgccccatatgtgggaataatgctggactaagcagcagctcactcaaactacatctgcagaaatcacatagaaagctatcatctgggagtgtagatagtgccatgactatggaaatccagaaagcattaacagctttgaagattagccgtggtgggagtgtcagccccacacaaagatcatctcatccactgatagatcaatagaaactgcaaatttatagattttgtgcattcaagtatcagcaggttagaaaattgagtgtttttggtggtgcattaaaaacaaatcgattaagtttctgcctttataatgaagcaacaatttatcacttccaaaatttcccaaattttttaggcaattttggccccatcccaatctaacagctaatatcacccaaatagtgttttcagttagtttttcttctacaaagtataagtgaaatataggttcagagcgggtctaacggctgtcccattatatgttcaattggagcatcagaattcttctcataataaagttttccacaggccagcacacgggtctgttaggatatgattgctattctctgaccccaagttcgtataatcagaatcaagtttatccc

SEQ ID NO: 247 - DNA, 561 bp, Glycine max
atggcctctgtttcagccacttctctcaggttccaaccctttctcaagttgtctacaaggactactacccagagaaatcaattcaaatttccaaatattaatacaagtgagaaaaaatttagaaggtgtagtgaaatgtatcatgatttggagggtcggtccaatggttggaaaagggtgacgaaagaagggagggatcaggggtgttacaaaacttcaagtttgggggcagtttctgtgggatggaataggagaacctttccctctttgagatcctcccgtttacgcatttgtgcagtcaaggcacaaccggagacagtgcagaaggtctgcgatattgtgaggaaacaacttgctctgcctgctgaatctgagcttaccccagacaccaaattttcagcacttggtgctgattcccttgacacggtggaaatagtgatgggtttagaggaagagtttggcataactgttgaggaggatggctctcaaaacatctcaaccgttcaagaagcagctgatttaatagagaaactgattcaagacaaaagtggagctagttag

SEQ ID NO: 248 - DNA, 1689 bp, Glycine max
gggcttccatgtgccaactctgcagatttgaggaggctcgggccgttggtcagctcaggaaccaaagattgataaatctgcttggatgttgttgtgaaggtgaagaaaggttacttgttgcagaatatatgcccaatgatactttgacaaagcatttattccattgggaaactcagcccatgagatgggcaatgcgaatgagggttgctctgtgccttgcccaagctctagagtactgtaccagcaaaggacgtgcactatatcatgatctgaatgcctacagagttctttatgatgatgactacaatcctagactttcatgcttcggtctgatgaaaaatagtagggatgggagaagttacagtacaaatttggcgtttactccacctgaatatctgaggacaggcagagttactccagagagtgtaacatatagctttgggacccttttgcttgacctcctcagtggcaagcatattcctccaagccatgcccttgacctaattagagacaagaaccttcagatgctatcagactcttgcttagaaggagagcttacaaatgatgacgggactgaattagtgcgtctagcctcacgatgtttgcaatctgaaccacgagagcgtcctaatccaaagtcactggttgctgctctaatacctctacagaaggattctgaggttccttctcatgtgttgatgggtatcccagatggtacagctgcttttcccctttcacctcttggagaagcttgtctacgaatggatctgactgccctgcatgaggtgatggagaaaattgggtataaagacgacgagggcgcagcaactgagctttcattccaaatgtggacgaaccagatgcaggaaacgttgaactcaaagaagaaaggggatgctgcttttcggcacaaggattttaaaactgcaattgatagctatacgatgttcattgatgttggaaccatggtttctccaacggtttatgtacgtcgtagtctatgttatcttatgagcaatatgcccgacgaagcacttaatgatgcaatgcaagcacaagtaatatcccccgtttggtacattgcgttttatttacaagctgttgctcttttagccctgggcaaggagaatgatgcccaagtggcacttaaagagggttcttcactggaaactaaaaagaacacaaattagttgagttcgttgaccaaaccttgctttcttgttcttgaagataacttacatagaacatgtgctggtttctcaatgttgcaaggggctccagttccttatcggacaaattgtattgcatggaatagagtggtttattatacttgtgcatgactggttccattggttgcctagaagcattcttttgcacagactagagtcaccaaagttatacaatatgtatttgcactagggttctctttttgttgtttagtcagctatgttagtataaaggtcatgggaaggatttgagaaacttttgagagagttgtgtttgtaaaggttcacttgtcagtgcatgtcaccatttgttgggtaaacagcagatgctgttgttgtgcttgtaatttaatgtacagaacaattggttatggctactgcgtcgacatgaaataggttgtttctgtatgttgtattgatattgattttgcatataataaattcttttaatcttttctgtgct

SEQ ID NO: 249 - DNA, 1587 bp, Glycine max
atggacgcagcaacggctttaatgatcctatcagcaatagcggcctatttaatatggttcaccttggtcactcgctccctcaaaggtccacgtgtctggcccctattgggcagcctccctggcctcatccaacacgccaaccgcatgcacgactggatcgctgacaacctccgcgcgtgcggcggcacgtaccagacctgcatctgcgccctccccttcctcgcccgaaaacagtgcctggtgactgtcacgtgcgaccccaaaaacctcgagcacatcctcaagcttcgcttcgacaactacccaaaaggccccacgtggcagtccgccttccacgatttgctcggcgaaggcatcttcaactccgacggcgacacgtggctcttccagcgtaagactgccgcactggaattcaccactcgcaccctgcgccaagccatggcgcgctgggtgaaccgagccataaagcacaggttctgccccatcctagccacggctcagaaagaaaaccaatcagtggatcttcaagacctcttgcttcggctcacttttgacaacatatgcggcttggctttcggccaagacccgcaaaccctagccgcggggcttccagataacgctttcgctctctccttcgaccgagccactgaagccactctacaacgctttattctgccggagatcttgtggaagctgaagcgatggctcaggctcggaatggaagtgagcctgagccggagcctcaaacacatcgaccagtacctctcccacatcatcaagaaccgcaagctggagctgctgaatggtaatgggtcccaccaccacgacgacctcttgtcccgcttcatgaggaagaaagaatcctactcggaggagttcctccaacacgtggcactcaacttcatcctcgctgggcgcgacacgtcatcggtcgcgctcagctggttcttctggctctgcgtcaagaacccgcgcgtggaggaaaacatcctaaacgaactctgtactgttcttctgtccacgcgtggagataacatctccacgtggctgaacgagcctcttgtgttcgatgaggtagaccgtttggtctacctcaaggcagcattgtctgagacactgcggctttatccctccgtgccggaggactccaaacatgttgtgaaggatgatgttttgcctaatggaaccttcgttccggcaggttccgcggtgacctattcaatttactctgttgggaggatgaagttcatttggggagaggactgcctcgagttcaagcctgagcggtggctctctcctgaaggggacaaaattcaggtgcaagactcttacaagtttgtttcgttcaatgcgggacctaggctttgtttggggaaggacttggcttacttgcagatgaagtcaatcgccgccgcggtgctcctgcgccaccgcctcgctgtcgcgccgggccaccgcgtcgaacagaagatgtcactcacactgttcatgaagtacggtctcaaggtgaatgtgtacccaagggatctcaaacccgtgctggaaaaattaaccaccatcaagagtgttactgttggtcaaaagtga

SEQ ID NO: 250 - DNA, 1124 bp, Glycine max
ttttcattgccatctctatattttttttttcaaaagtaaaaagtaaatcaatataaatattctttatatttaattccaagtaactcaataacttactgcactattgtacagcgaggtcaccaaattttccttttgacactgaggtatgagttgttggtttgggtcgtgagcctgtttgggtttgtgcatttgtggactgtgaagcaagcgtttcacactttcctgtatatattactattattcccagagtttgtgtgtgaggcagcaacacacacaaagaacaaaaggcaaagacagagagagaaacaatgtcttccccaagcaaacgtcgagacatggacttgatgaagctgtcatcatcaggatgatgagtgattacaaggtggagacgatcaacgatggcatgcaagagttctttgtggaattccacggacccaaagacagtccttatcaaggtggtgtgtggaaggtaagggtggagctacctgatgcttatccttataagtctccatctattggctttgtcaacaaaattttccatcctaatgttgatgaggtgtctggttctgtttgcttagatgttattaaccagacttggagtcccatgtttgaccttgttaatgtgtttgaggtgtttcttcctcaacttcttctgtaccccaatgcatcagatccattgaatggtgatgctgctgccttgatgattcgagatcatgctacatatgaacaaagagtcaaagaatattgtgaaaaatatgccaagccagaagatgttggagctgcacaggaagaaagttctagtgatgatgagctgagtgaagatgattatgcctccagtgatgacgccattgtaggccaacctgatccttagatttttaaatacaatgcctgccttatttacagtcttgcttgtacatgatatcatatgatttgatattgagtccaggaatttgaagagctaagttcttaaggttgaaggaaaaattcacacctttctatctattataattacatggtggttgaataaattgatttataatttagatgtttatgtgactagaaaattcaatttctgaaggctcaagctggtttggcatacgaatgcatttattacttctagttaa

SEQ ID NO: 251 - DNA, 3982 bp, Glycine max
caaagtgtaatttgtatcaattagggactcatgatcaacttgtatcattcatggactatttggctcaaatatcaaggaattgtgtgcattacagggctcaaattacagattatcttgatgtgatactgctaagaagttgaaaatctatagaaaagatggtgaaacatcgctttagagagtctattaaatctttgtttggaagtcacattgactctaataaagaagagcagctccaggaagctaaagcagaaattgaagacaaagtgaaaaggatattgaaacttattaaagaggacaaccttgaagaggatggtaccccagtagaacattctaagaaggaaccgcttgttgaactgattgaagatttccacaatcaataccaatcactgtatgcacaatatgatcatctaacgggcgagttaaggaaaaagattaagggcaagcgagaaaagggtagttcttcatccagctcagactctgattcagattcagactattcttcaaaggacagagacaacaaaaacggacaactggaaaatgaatttcaaaagacaattcatgacttaaggcaagaacttgaagtggtgcatatagaagtggctgagttaaatcgtaagttgacaatcacacatgaagagaaggaggatcttaattcaaaatatcttgcagcattgagcaagatacaagaagcagacaaaattaacatggacttgaaaactgatgctgaagcattaggcactcaaagattaaaacttttggttgagaatgctgaactaaataaacaactggacactgctggtaaaatagaagttgaactgagtcaaaaattggaagacttaacagcagaaaaagatagtttgaccatggagaaggaaacagctctccaacagattgaggaggaaaagaagattactgatggcttgagaacccttgttgatcaactgaaagatgagaatttagcacttggcaaagagttagaggcagttacaggtgaattttccattctgaaacagcagttggaacatgcagaacagcaaatgacagatataaggcacaatctgaaagttgctgaggaagaaaatgaatctttaaaagtgaaactttcacaggcttcaaatgaggttcacctggctcacaatagaatacaagattttgtagctgaatcaagtcagttaaaggagaaacttgatgagagtggaagggaaatttctgccctcactcagatgcatgaaggatatcagaaagaatcctcaaatcaaatcagggaactggaggcacaagccacaaccctggagcaggaattagaatcactgcaaaaccagaagagagatatggaagagcaaattaagagcagcacaactgaagcgggggaactaggagagctcaattcaggactacaaaaccaaatatcagaacttgaaataaagtccagagaaagagaagaggagctatctgctatgatgaagaaactcaaagataatgagaatgagtcatcttctaaaatgtcagatttaacatctcagatagataagctgctggccgatataggcacattacatgctcagaaaaatgaactggaagagcagatcatttctaaaagtgatgaagcttcgactcaagtcaaaagcattacaaatgagttgaatgcgttgcggcaagaagtggagtccctccaacaccagaaattggacttggaatttcagttagtggaaaaagtccaagaaaattctgagtatgtgattcaaatgcaaactctgaaagaggaaattgacagaaaaatcctggaacaagagagacttctggaagacaaggaaaatttagccatgaagctaaggaccctggaattagagatgaacactataaagaataaaaacagtgaagctgaagagcaaataagggctaaaagccatgaaatcagtcacatgagtaagggaatgctggagctacacgaaaaaatagcagaaatagagaaaatatcaacagatagagaatcacatttcttagttctccaggataaatttattaatgcggagcaagtggtttcagctaaaataaaggtatccagtgaacaaattaagaatcttgaacatgatctggcttccctgcatcaggagaaacaggaattagaacagcagtgtgaaaagatgaagttggaggtggattccatacagaaccagaagagtgaaattgaagaacaaatgagagctaaagaccatgagaactctgggctgagagaggaaaatttgggatttcagggaacaattactgttcaggagaacacattagccgagaaagaggcagagctatcctctttacaggaaaagcttcacgaaaaagagagtgaggcttcaggccaaataactgccttcacagtccaaattgataatctaaaacatgatttggtgtcttggcagaatgagaaacaggaattagaacagcagtgtgaaaagctgaagatggagctggattcaacaaacaaccagacgggtgaaattgaagagcagctgatagctaaagaccatgagaacactgaactgagagaggaaattttgagactgcaggaagcgattgctgcactggagaaaacattagctgagaaagaatcagagttatccactttacaggaaaagcttcacgaaaaagagagtgaggcttcagggcaaataattgccttcacgtctcaaattgataatctgcaaaaagacctgctttcctttcagaaaacaaaagaagaactggagctccactgtgaaaaaattagcgaagaacatgcacaaagccttgtaatggtagagaatgaaaagaatgacatatcaagcagaactatggatcttaagagatcactggaagagcgagaagattcatatcagaagttgaatgaagagtataaacaaatcgatagtttgtttaaggaatgcatggtcaaacttgaagttgcagagaagaagattgaagaaatggcaggagagtttcatgaaggcattgagtcgaaagataagaaggtagctgatttggaacatacagtggaagagcttaaaagagacctagaagagaaaggagatgaaatcagtacttcggttgagaatgttcggatgcttgaggttaagcttcgtctgtcaaaccagaagctccgggtcacagaacaattgttgagtgagaaggaagaaagctttaggaaggcagaggaaaagtttcagcaagatcagagagcccttgaggacaggattgctactttgtcagcaataataacggccaacagtgaagcttttgatgaaattgtttctaatcttaaagagcgtgtgaacaatgtcacgactggcatagaaactataagctggaaagtttctgatgactgtaaaaatttcgaggacagtatctctaacatctcacacgagctaggggttgcaaaggaccatgtgagggagatgaatagggaaaaagagcagttaaagagagacaaaaaccacttgttggagcagctgcagattaaaaaagaacaggaagtggctttgaggaagagtgttgagaagctagaggcaaaagcaagcaaggaggaatcagagaagatgaatctgacaacaactgtagttcaactaaataggacagttggagagcttgagaaaaagatgaaagagaaagaggatggcatgctggacttgggagaggagaagagggaggtcattaggcagttgtgtttgtggattgattatcaccgcagtcgttatgattatctcaaggacattctatcgaagtctcgcagaggccagagtgcagcataaatcctcttttcttttctttttttgtatgcagcttgttcgttgtggtgattcaacttctcattagctcattttttgttcatgtgaattgattctttttgtgcgtgtttgtaatttaatttgtccagtatcaggagcatcgtatagaattagatttgttcttcccttgaatttgaactgaataatggtacagcagttttttcctt

SEQ ID NO: 252 - DNA, 1478 bp, Glycine max
attgtttgggggtggggaaaaggatgggtaagtgtgtaattttggtccgtaagactaaaccgaaccgaacagcctcgttttactcttgggcttggagtcactttgtatttcctcaaaggaaagtgttcagtctcctctaccagaccgaggttgcaattgttgatctgatctagttaatacttctgattgcgatatgctttgctgaaatgaccttgggcaaaaacacaaaactggataaagcgcgcttcactcttatcattactgccatcctttcttcttttggaaggtcaatgtcatggatgacggtcctgcaaaattaaatatcatccctgatcattttcaagttccaacagcaagtatagaatctcctgagagcagaacatcatctattgccgaacctggaaccgatcaatcttcaaggtcctcgtgccgtcaacggactcgaagtaaattaaggacggctttcatgttgaacttgtttactccacagcggctgtcatggggttccagtactggaggtcaggaaaaggttgagctaacagctgcagaattagagtcacttcgatcggagcttgctgatatagcagagagggaagctcactcgaaagctcagttggaacatattgatgaagttttgcggtctgctcgtctatctggatatttatacattcgaactagatgggcaacactaccaggagaacctccacctttagatgatactgaagtagatgattggcttcctcgttttgtcgttctccatggagcatgtatatttttatatttgttgtgtacagacctaagcccccaggactcaacccttctatctgatattgttgaggtaaggagattaccatgctttaagcgagaagatggtgaaattcaatatgccttttgtattttaactcgtcatggattgcgctatgagtgctcaagcaattctaagatacaggtggcctcttggttatcagctttacaaagtgactgcaaattggaatctgatacattttgcaaagctgactacaaactggaatctgatacatcagtttccaatggttcgattgagatgtaacataattacaccttgtttggcatataactttggtgtactgagcgtggttgatggccgagaaactaaaagaggccttgtatatctttgaaaacacagggcaatctggacctggaaagcttttgtaactgtcagaaaaggaatgacagataggaaatcacattttgccaacatttgtgggggatttgtagacctaatctgttgtaatctgcaatgccatggcaccctttcttgttgttatagccataggtacaatttgtaaatcaccatccaacccgtaaccaatgggaaagcactatttaaggaagatatgagatcggaatcatttgaggtgtttgttttaagatagatggtttcattcctgtgaataacattcttacatgcgagtatattaaaaaacattactgggttt

SEQ ID NO: 253 - DNA, 882 bp, Glycine max
atggatccaccaccctctaagttcgtaatcgaagcatcggaagcccttgccctggcggagtccgccgccgtgaccctcccggaactcctccccaccctggtccccgccgcccagcccctcgcccgaccccccatctccaagttctccgtggccgccgtgggcctggccccctccggccgcatcttcgtcggcgtcaacctggagttccctgggctccccctccaccactccgtccacgccgaacagttcctcatcaccaacctctccctgaatgcggagccccacctggtgtccctggccgtttccgccgccccctgcggtcactgccgccaattcctccaagaactccgcgccgccgccgacgtgaaaatcctggtaacctcggaggccacagcagaattcagggcactctctgacttcctccctcacaggttcggtccccacgaccttctcccccttgaagctccccttctcttggaaccccaccactacaccctaaccctccaacactatctcaacgcccacgtgcccaatcacaagttgaaaattgcggctctcgaggccgccaacaaatcccatgcaccctacagtgggtccccctccggcgtcgcccttctcgactgccatggtaatgtttttaaaggctcctacatggaatccgccgcgtttaatcccagcttgggccccgtccaggcagccctcgtcgccttcgtcgccggcggcggcggcgactacgaccggattgtgggtgctgctttggtggagatggacggtgccgtcgttaaacaggagcacacggcgaggctgttgattcactccatttcccccaattgccaattcgacacattcctttgccacaacaacaacaataatgaatattga

SEQ ID NO: 254 - DNA, 1272 bp, Glycine max
atggacccttgccccttccttcgcctcttggtggaatccctcgctctcaagctcccttcctctccggccaaacccccacccctctccggtgtccacccttccaccaccccctgcttctgcaaaatccgtatcaacactttcccttcccacaccgccctcctccctctctcttcctccgcctctgcccccgacaccaccacctccgcccccgccttccacctcgaccccgccgccctccgccgcctctccgccaagcccctcaccctcgctctctccgtctacaacggcccaatgggccgctcctgcggggtccgcggcgccaagcttttgggcagcctccacctcaccattaacctccccgctgccctctctcactccaacaccttccataacggctggctcaacctccgtggtgggccccacaataataataataataaaccatccgcccagcttcacctcgtggtccgctccgaaccggaccctcgcttcgtctttcagttcggaggcgaaccggaatgcagccccgtggttttccaaattcagggaaatataagacaacccattttcagttgcaagttcagtgcggatcgcaactacagatcccggtctcttccatcagattttacaaagaatcgaagtgggtggagaagatccaccacaggtgagaaagagcatcaaggaagggacagaaagggttggatgataatgattcatgatctctctggctcaccagttgctgcagcctccatggtgacaccgtttgtcccatcccctggctcagatcgcgtgtcccgatcaaaccccggtgcctggctcattctccgccccaacggggcctcagagagtagctggaagccatggggtcgtctcgaggcgtggcgagaaagaggtcccgttgatggcttgggctacaaggttgagcttttctctgacaatggaccagccaatagaatacccattgccgaaggcacaatgagcgtcaaaaagggtggccagttctgcattgattacaaggtcatgaaggatgctggattgggttcaaggttgccaggggaagaaggctttgtgatgggttcaactgtggatggtgaaggcaaagttagcaaacctgttgtgcaagttggggcacagcatgtcacgtgcatggctgatgctgctctcttcattgcgctctctgcttctgttgatcttagcatggatgcttgcaggcttttctcacataaacttagaaaggagctttgctatcatgaacaagattccttttcatag

SEQ ID NO: 255 - DNA, 2897 bp, Glycine max
tttctttaattttgttgtgtagcatataaattatttagtttgtattataatttttaaaatagtggtcatcctgctctcccgctatagcattttcagagttgtccgctattccctgctatctgagattgataactatggttgccacattgtttgctacagagatgctttcctagcggccaccctcaacccccttcaattttccatctaatccttcttttatttagttttaaggatggctcaagacttttacccctcctattgcttgatagcttataatctgagtgttttgttcaaaatctgtgcaatctgactggaggaacttgatttcagtttctggtgttcaaagcctttcttccagtgtgcaaagtactccagaaaaaaatggccattcagatggtgcttcaaaaagttcagaacttcttcagcagttcctaaaatgtggtccaaagaaggaacttcttcaaatgtgttttgacaaggacaaaaaaagcatttcatcaaaaggcagaatgtctgaaactaagtcaaccagtaagataactaagaaacaagacacgaaaaaagtttctagtttcagccatcagccccctagaaagcaacctcggaagggtgaaaaccctactcgaatcatacctcctcttgaccagtcttctgattttggccattcaaacacttggatttgtaaaaatgctgcttgtagggcggttctgtctatggatgacacgttttgtagaagatgctcttgctgtatttgtcacctttttgatgataacaaggatcctagtctttggttggtatgcacatctgaatctgctcaaggagactcctgtgggttgtcttgccatatcaaatgtgcccttcaacatgaaaaggtgggagttgttgatcatgggcaactgatgcaactagatggtggctattgttgtgcgtcctgtggtaaagttactgggatacttggatgctggaagaagcagctaaatatagctaaggatgcccggcgtgtagatgtactctgttacaggatatatttgagctacaggctcctggatggaacctcaaaattcaaagatttgcatcaaacagtacaagaggcaaaggctaaactggagacagaagttggtcctgtcaatggtgtttcttccaagatggctcgaggcattgtcagcagactccatattgccagtgatatacagaaactctgctctcttgctatcgagaaagctgatagctggcttgccactgttcccaatgtaaattcagattccacagagggttcttttcctgctgcttgcaagtttgtttttgaagaggtaacaacttcctcagccaaaatcattttaattgaaatgtcaagtatatgttctgaggaaattaagggatacaagctctggtattacaagagttgggatgaatcacccactaaagatcctgtttccgtgtttcccaaatctcagaggaggattttgatatccaacctcaagccttgcacagaatatacttttcggattatatcttacactgatacacgtgacttgggtcattctgaggctaagtgtttcaccaagagcattgagataattaaaaacaatccctcttcatctgttgctatgaataatgaaaaagagaaccttctaactaggggtaattcttcggcctccaagatagggcccaatgccacaatggaaggctatggattcaaggttcgagaccttggaaaatttttgcgtcttgcttgggctcaagaacaaggttacttggaagagttttgctgtgccaatgtgaaaaattgctgtggacaaagtgaaatggtggataagcttagaattccagaagcacagttgccttcagtttcacgaggccttgatttaaatgttgtttcagttcctgatttaaatgaagagctaacacctccttttgagtattctagggatgaagataacggttgctctttgctgcaagctgttgaggcagatgatgatgctgcttctcatgatctagagaaaaatggtttagcaagatcacatgggagtggggattcccagacctggacccatgggccaacaggagaagtgtctgctgttgattctcgcatagatatgtgcaagaaaaggatagcaagcacaaacgaagagactcatgattgtgacagcactttgataaatggttctcctttacgcatatctgatggttcttgttccttggatgagaactttgagtattgtgtgaaagtaattcgttggctagaatgtgagggtcacatcaaacatgaatttaggttgaaattgctaacatggtttagtttaagggcaacagagcaagaacgcagggtggttaataccttcattcaaactcttatcgatgatccaggtagtttggcaggacaacttgtagactctttttctgatattatatccaacaagaggctaagaagtggattctgtagtaaagctggggcatcaaattaagggcattttttaaaattaatcaccttccaagggattcatttttattgcagacaagctttgtcttgctaaaaggatttgctttgatgatctcagaaacagtaactcatttttcccaggagggaggatttatggacatgaagtttcaggatgtaggaggcattacgtcatttctaaattgctgcaattatttttagtaatgaatttaattacggaagatattaatattgaaactctcataacctttatctgaagaaggtacatgattcaattggtgatttgatttatacttgcattcttttgtcatcttattgttcctcatattgatgagctggcaaatgaaaatgcttgcttcaaattgcgggtaaagctgctgccattagacaatagatttatggggttacgtcttatagcagactgcatgccaaggttcaa

SEQ ID NO: 256 - DNA, 1437 bp, Glycine max
tagaggcacagctgtcttctggaatgttttatatatgaatgaatgaatgttttggtctgtcattgatctgatctgtatttggctattatggttttgaggggaaaggaggcttccacgttgattctgctccttctcttccccttccgcaaagggactaccatgcgcttcgccttcaagaccaggagatggaaccactttcactgactaccttctctttccaacctctcctggtcacaccctttttacccactcttggattcctcgctctcctgtcacttccatcaggtgacttgttcttcttattcatggacttaacgagcacagggtttacgggatggattggcttggccacggtggaagtgatgggttacatggttatgtccattctcttgatgatgctgtttctgatatgaaaatatttttggagaaggttctgaatgaaaatcctgggcttccatgtttctgctttggacactcaacaggagcggccattactcttaaggctctgcttgacccaaaggttgaatctcgcatagctggtgctgtattgacatcaccagcagttggtgtttccccttctcatccaattttgctggtacttgctcctatagcttcatttttgctgccaacgtatcaatgtagttctgcatataagaagggatcgccagtgtctagagacccagaggcgctaattgctaaatattctgatccattagtatatactggacctcttagagtacgtactggttatgagattctcaaaattacaagctacttgcagcaaaatctgagaaaattgagagttccattttttgttctccatggcactgctgattccgtaactgatcccgttgcttctcaaaaattatatgtagaagcctcctcaactgataaaactatgaaactatacgatgggttcttacatgacctgctctttgaacccgaacgagatgctatcacacaggatataattcaatggctgaacagtagagtatgaatataagtcgtggcgtcagtgaaaatatcatgaaatttttcaaccatttgaaaattgaagaagcaccttgtctgggtggataatatctgcctctttgtagaggaaagaaatttcaagctgaagctacataaatcgaggcattcttttatcttcaaattctaagaccatatatcagcttcttttatagttaggatcagatttattactcttttctccgatccagtagttatccaaggagcgcagtaagtatttaccttcaattaggttttttttcctttgtcaactttgtccatagaaagtatgtaccattttctttgtgatgattactaagccatcacttattttaagtttagcatttgtgccaaccaacaagtgggccagtgcttgctctgtttaaattataacaacaaagttttatatcatttggctcggttacatat

SEQ ID NO: 257 - DNA, 1370 bp, Glycine max
ctatacagtctacataacgcaatttctttatctttttcaaaatactgagattgggattaattttgggttgtggcaattgcaatgttctcacagtgccattttctctcagtccccaatacccaataatagtgcctttcgtctgagagccatggcacctcacagctcgcctcttgaactcaatcacttcgccgaggtcggtaacaaagttgccgatgctgccggagaaattattcgcaaatacttcaggaaaaacttcgacgttattcacaaacatgatctcagtccagtaaccattgctgatcaatcggctgaggaggctatggtttcaatcatactagacagtttcccttctcatgctatttatggagaggaaaatggttggaggtgtaaagaaaagaatactgattatgtttgggtattagatcccatagacgggacaaagagctttattactggaaaacccgtatttggtagtctcgttgctcttctacaaaatggcaccccaattcttggcataattgatcaacctgtgttacgagaaaggtggatcgggataactggaaagagaactacactgaacggacaagaaatatctacacgcacttgtgcggacctttctcaagcatacttgtataccacaagcccacatctgttcagtggagatgcagaaaaggcattcatccgtgttagaagcaaggttaaaattcccttatatggttgtgactgctatgcatatgctcttttgtcttctggttttgtggatcttgttgttgagtctggtctgaagccatacgattttcttgcactgatacctgttattgaaggcgctggaggtgtcataactgattggaaaggagataaactgttttgggaggtttctccactttcaatcccaacatcaggttttaatgttgtggccgccggtgacaaacagattcatcaacaagctctagattcattgcagtggaagtgatagcttgaattaaccttaggtgcaaatagtcttggttcagatgttccagaggacatgtatattcggcatttaagttgaaaaccgtgcactcagaatcttgaataagtacacctgcagaagttaacctctttctggattggatggtcacgagctcttcaacaccttatagcatcaacaccttatagcaagttccaaaataaaattttctgtaagttagaattccatggtattgtaataattttctgtaagttaatgattcttcccaagtcctgttttaaaatagattgatgaaattaatataaagcaaacgctaacggccaaaataatctagttttatgcttgagttatggacaaattattattattagaaaagtataaaattagtaggcaaagtacg

SEQ ID NO: 258 - DNA, 1560 bp, Glycine max
atggcttctgcttgtgtgaccctgaaagccaatacccatttagcaaactctgagaaaggctttcttggagaaagaataaaaggtggcttcaacaacagtgccttggtgatgaatcagttggctatacgttctagaagccacaagagggtgaaacatggtgttggtgttgtatcttctgttctcacatcaaacaatgccaaagaatcactgaccttgcaagtgccttcctttctgagaagaagagctgatccaaaaaatgttgtttccatcatattgggaggcggacctgggacacaactctttcctctcaccaaacgtgctgccacacctgccgttcctgtgggtggatgctacaggcttatagacatccctatgagcaactgtctcaacagtggcatcaacaaaatatttgtgctgacccagttcaactctgcatccctcaaccgccacatcgcccgcacctattttggaaatggcattaactttggggatgggattgtggaggttctggcggctactcaaacaccaggagaggctggaaagaattggttccaaggaactgcagatgctgtgaggcaattcacttgggtatttgaggatgccaagaatacaaatgttgagaatgtgttgatcttggctggagatcatctatatcgaatggattacatggaccttgtgcagagtcacgtggatagaaatgctgatattacagtttcatgtgctgccgtgggtgacagccgtgcatcagattatggattggttaaagtagatgacagaggccgcatcattcaattttcagaaaaacctaagggtgatgatctgaaagcaatgcaagcagatacctctcttcttgggttgtcatcccaagatgcattagagtcaccatatattgcatctatgggggtttatgtattcaagacagatgttttactcaatcttctgaaatggagatatcctacctcaaatgacttcggatctgaaatcatccctgcagctgtgagggatcacaatgtccaatcatatttttttggagactattgggaagacattggaacaataaaatccttttacaatgctaacttggctcttactgaagagagtcacaagttcgaattttatgaccccaagattcccatttacacatctccaggattcttaccaccaacaaagattgacaaatgccggattgtggatgctattatctcccatggatgtttcctgcgggaatgcacagttcaacactccattgtgggtgaacgttcacgcttggattatggcgttgaggtcctggacactgtaatgatgggagcagactattaccaaactgaatccgaaattgcttctctgctggcagaggggaaggtcccaattggtattggaaggaataccaaaattaggaactgtattattgacaagaatgcaaagatcgggaaagatgtcatcatcgcaaacaaagatggcgttcaagaagcagatagaccagaagatggattctacatccgatcaggaatcaccatcataatggagaaggcaaccatagaagatggcactgtcatataa

SEQ ID NO: 259 - DNA, 2124 bp, Glycine max
aaagtttgtctaagtatccgctgttggacttgttgctgtgaaatccattgggcctaattggaaagcaaaaggatcagtgtgctgtgcgttgcagcgatagaggaaaaatgttgattcgacgattgccttggacggcgatttcttttgccgcaccacttcccttctgtttcggcgctaccaatggacttcccattcgcaagcaacttaactcttctctcttctccttcttctgctccagctccggcgtcaatctccctctacaacctggtcacgaaacggatactcgtcactcgcagtctctgaaacccggtctttacctcgttggaacgccaatcggaaatctcgaagatatcacactgagggctattcgcgtgctgaactcggctgacgtcatactctcagaggacactaggcactctgggaagttgcttcatcactacaacatcaaaacaccccttatgagttatcacaagttcaatgaatcgcatagggaacagcttgtgctgaggaggttgaagcagggtgagattgtggctctcataagtgatgctggaatgccaggtataagtgatcctggtacggagttggccaaattgtgtgttagtgagaatatcctggttgttccaatccctggtccctgtgctttggtgtcggctctttctgcctcgggtttacctactgacgaatttacatttgttggttttcttcctaagcattcgggatcgagaagaaaaaggctcatggtttcagctgatcaaacaacaacacaaatattttacgttcctcctcacaagctttctcagttccttgatgagagttcttcaatttttggtgatgcaaggcaatgtgttattgctcgggaaatgactaagttacatgaagagttttggcatggtactcttggtgaagccaaggaagtattttctattcgtcaagtgaagggagaacttaccatattgatcgaagggaaagcaaattctaaagttgaacctccgtcagacactgagcttgagagtgaactaagagaactgattgctggtggcgagagtctttccacggctgtcaaattggttaccagccggacatcagtgagtagaaaaactatatattcacttgcattaagaaagtttgggaagcaacttgaagtggatgatgattcaaattagtgcagattatttctgcagagacgtgaaatgtactaggaatttgaacggataataaaagctgaaagatatatattgaaaagagtggaaatggcaaagattgaaactggagacagctgcgtgttaatggacgagacagccaaactgggcgggcggtctggatctcgggcgctgcacagggacatatcataggcacatgcaaattgccctttttctcccccaaagcgggccccaccacttattatattcattgggcctaatccttattgggttccttacttaattataacaataacccaactccatcaacaactcaaccactcttgatccttcactaatgtagtacaactacatgtccacaccgtttgaaaaaacccttgtaattctttttttctttttgctatgatcctccttgtaatttactcctaattacaataatacaacacttgtttattttgtaagccctagacttgctactcaacttgaacccatcatcacttcccttatttatctattttgcatgtttgctctactttctacatattacatatcatccttgttgggagtgagggagggatgaaattgaaaaatttgttgccctgtgcctaagattcggcggggatcgaattgcatcttcctggcattgaattgggtccacttatcaccaaagtggtccatccactcctgctgcgtagtgtaatggggtaggtactgtttcaccttgatctctgaatcatggcagaatctcagaatctgacggttctgattagttaggtactccaatgtctcagtatccaatgctgatcttagaaatgccaccaggtaaaacacatcctcttctggtgtcaccactgagcttcgatggtcccacctacacattaccatcacccaaaatcatcttttggaaggattcatttgcttactacttaacaatcctttgacttgtcacttagaaaccaat

SEQ ID NO: 260 - DNA, 435 bp, Glycine max
atgggttctcttatggcaggatgggactctctgatcttagatcctgaatcagctacaattgagaggaatcgatcactcaccaaagaagaaattgatgcttactggcgagcaaagaaggagacagagttagaacacctcagagctatttccaaactatctgagactattcagacccgaaaatgcgaggattcagagaattctcataagtcaagtactgtgactttggccagcataaaggagtccttaggcatggacgttgaccagaaaagtttagagcagcttatcaagaaaaatggctggtggaccaagagcaactgggcatttctgaatgaaccgccggtgatagaagctgcttccaacgagtatgcgtcacagtttcacgtggccaacttggggtcaacgaaatttaaccccggagatggaattagtgcttga

SEQ ID NO: 261 - DNA, 907 bp, Glycine max
ataaggctacgttcatataagaaaatcgtcatcgactaagaaagacattggagaattaagtgtggcttagttactaagtttgttacggtaaagaaaaaaaattcagcaacaaatacaatgggttctcttatggcaggatgggactctctgatcttagatcctgaatcagctacaattgagaggaatcgatcactcaccaaagaagaaattgatgcttactggcgagcaaagaaggagacagagttagaacacctcagagctatttccaaactatctgagactattcagacccgaaaatgcgaggattcagagaattctcataagtcaagtactgtgactttggccagcataaaggagtccttaggcatggacgttgaccagaaaagtttagagcagcttatcaagaaaaatggctggtggaccaagagcaactgggcatttctgaatgaaccgccggtgatagaagctgcttccaacgagtatgcgtcacagtttcacgtggccaacttggggtcaacgaaatttaaccccggagatggaattagtgcttgatatatgactttttctatctcacgtcgccctgtatctatatatatctccacgagtattcagtatagttgctatctatatgtgtaatggcttctattttgtcacttataattctgcaaaagaactgtatttctggtttgtttgaaaagggatgaaaaaatcccaacagatttttaagagagaatattcaactagtttgactttgtcgttaaggaaagcatgcagtacgtttcgtttgtctgctttctaatcctaagatgtagagctattatttgctacgtagcattgattaactcctactattcttctagtttttttttttttaagagattgtagattatttgatacgtgaaaaaaa

SEQ ID NO: 262 - DNA, 1896 bp, Glycine max
atgccatacaagtacgagaattatgacccctcattccccgaccaacccgtggttgacttatacctcccagtttgggccaggttacctgccttcaagtccaagccagctttcatttgggcacaagacttgcacaccttcactgctctcacctaccaacaacttaacgccacagttgatgtcatctcctctcgactactcgctccgttacaacgaggtgacactgttcttcttctttgctctcctggacttgacctagttgagctcatctttgcgtgtcaaagagctggtcttttgagcgttcccatcatccctcctcacccttcttttgctaaagaaaactatcaccatctcataagagccatttcgcagaccaaacccaaagctgccctagctcaccctcactacatatcaagcattagacaatacgtgtcttccccccacaacaacaagaaacttgctcacatgttacatagcatccactggatttccgtagacgaactcaaacatcatcatggtgttgttactttaaataatcttgattcactgacatacagtggttgcaaagcgaatgaagtttacttggttcagtacacgtctggtgccactggggttccaaaacccgtgcttgtcacagcgggctcagctgctcacaacgttagaacagcgagaaaagcttacgatcttcatcccaacagcacaatcgtttcgtggctgcctcagtatcatgattgtggtctcatgttcttgttgctgacccttgtatcaggagccacgtgtgttctcacttccccaacggcgttcatcaaacgccccagactctggcttgaactcttgtcgaaattcaaggccacgtgcactcccgttccctcgttcacattgccactcgtggtcaaacgaggaggaattcaccaaggagcttctacttcatccatcaacctttcaactttgaagaatctcataatcatcaacgagcccgtctatagagactcagtggaagaatttgttcacactttttctccatttgggttaagcccttcttctatctctccttcctacgggttagcagagaattgcacctttgtgtccactgcgtggaggagcgttaatagtgatcataatgatagtgttggtgcctattattcttcaagcttcccagattttcccactcacaacaagctcttaccagttgcaaggctcgaaaacgtggaagaggaagacgtggagattatggttgttgatgaagaaacgttggagccagctgaggatggtgttgaaggagaaatttgggttgcttcaccaagcaacgcttctgggtaccttggccaccctagtttaacaagagaagtgtttcatggaagactaagaaacatgattagcaagtgctttcttcgaactggggacagaggcatagtgaaaggagaaaaaagatatctttttgtcactggtcgctgtcaagacgttatggaactccgaaatggtcgaaaggttcatccacattacatagaaactgcggcttataacagttgccccaagttactgagaggaggttgtcttgcagcgtttaaagtttcatcaacggtggtggttgtggcagagatgcagaggatcgaaaagggtatagaaaaaggtgtgttgaagaggatttgcgagggagttaaagaagctgtttggaagaaagagaaggtggaggttggatgggtggttttggttgagagtgagtgtgttccgaaaaccacttctgggaaattgataagagggaaggctaaggagaagcttcttgcaggggaaatggtgattctgatgaagatgcggtttggaaaagatgttactgtttttaagagagcaaagaaggtaactggttcaattttatttgcagaagctcgtagctcattataa

SEQ ID NO: 263 - DNA, 1896 bp, Glycine max; identical to SEQ ID NO: 262

SEQ ID NO: 264 - DNA, 210 bp, Glycine max
atgcaacaagacaccgccacgtggcaaaccaagttgcacccgagcagcgcaatctggcagttgagcacgagtggcaggcactcgccttgcgccgccacgtactgcggtccagaacctgtaaccaaacataacggagaacgggagcgtggtgaagaggatcgcgagaactccagccacaggaaagacatgaacgcggaaatggcgtggtag

SEQ ID NO: 265 - DNA, 3339 bp, Glycine max
cccaattcacacttgcgagcccactctagtgcccatttcatgtcatgctcactagattcagctacatagctaagctaagacacgctttcaagtttccaaggcacatagacacagacacgctcagaacagaacctgaccaaaatagttatatcctactcacattttacattcccacctctttcctttccccctcaccattctcgagattctcgcttttactacattacccctctcatttcattctgggtttaaggtagggtttaactagaaagaaatttttaacaaaataatagagagagaggcaaaaaccaaaagacgtggtctttctcattgatatatacatacacagatccctatggaatgaagtgggtgctccccaatcttcgcttgcgataattcattctttttgcttagtttaaagagaccagttttgttgtgttcggagagagacagatttgtgtgttgagcgcatagaacgatgagtttggttggtagaggagcaagttttgcattgtagtagttgtagcaatagccacacaacaaaagaaaacaaaaaaccaagtcttcgtcatcttcgtatgcagagatttttcttcaacatgatgatgatgattagtttatttaccaaacaatgattgccttgccttccttcgtgagatactggtagcaatttcaaaccttttcgagtaaccaaaaagaaaagaaaagaaaaaacaaaagctagaagatgaagcgcatgaatgagagtaacaacaccgatgatggaaacaatcataactggttggggttctctctctcgccccacatgaaaatggaggttacttcggcagccactgtttccgacaacaatgttccgacaaccttctacatgtccccttctcacatgtccaactccggaatgtgttacagtgtcggggaaaatggtaacttccattctcctcttaccgttatgcctctcaagtctgatgggtcacttggtatcttggaagctctcaatagatcacaaacgcaagtgatggtgccaacttcgtctccgaaattggaggacttcttaggtggtgcaactatgggaactcacgaatatgggaaccacgagagaggtttgagcctagacagcatctattataactcacaaaacgcagaggctcaacccaacagaaaccttctttcacatcccttcaggcaacaagggcatgtgaatgtcgaaacacacccttattactctgtatttgcttgtcgaggtttgtatcaggcaccgtcggaggaagaagcaacaaaggaaacgcacgtttcagtaatgcctcaaatgacaggaggaggtttgcaaaactgggtagctccaacaagggagtattcaactcatcagcagattctggagcagcaaatgaactgtggcatttggaatgagagaagtggggtatctgttggaactgtggggtgtggagagttgcaatctctaagcttatctatgagtcctggttctcagtctagttgtgtcactgctccttctggaacagattctgtggctgtggatgcaaagaagagagggcatgctaaacttggtcagaagcagcctgtgcatagaaaatctattgacacatttgggcaaagaacgtcgcagtatagaggcgtcacaaggcatagatggactggtaggtatgaagcgcatttgtgggataatagttgcaagaaggaagggcagactaggaaaggaagacaagtatatttgggaggttatgatatggaagaaaaagctgcaagagcctatgatctcgcggctcttaagtactggggaccttcaacgcacataaacttttcgatagaaaattaccaagttcaacttgaggaaatgaagaacatgagcagacaggaatacgttgcacacttgagaagaaaaagcagcggattttctagaggtgcttcaatatacagaggggtcacaaggcaccaccaacatggaagatggcaagcgaggataggcagagttgctgggaacaaagacctttaccttgggacattcagcactcaagaggaagcagcagaagcatacgatatagccgcaataaaattccgcggcgcgaatgcagtcacaaactttgacatttcaagatacgatgtcgagagaatcatggccagtagtaatctcctcgctggggagcttgcaaggcgaaataaagataacgatccaagaaacgaggccattgactacaacaagagtgtagtaacaagtgtgaacaatggggaaacggttcaagttcaagcaagaaacaacaatgaaaatgattcggagtggaagatggttttatttaatcaccctttacagcaacaggcaaatggcagtgaccataaaataatgaactgcggaaattccaggaacagtgcattttctatggccctacaagatctcattggggttgattcggtgggttctgagcagcataatatgctggatgattctagcaaaattgggactcatttttcaaacccgtcctcgctggtgacaagtttaagcagctcaagagaggctagtcctgagaaaatgggtccctcgcttctgttcccaaagcctcctccaatggaaacaaagattgtgaaccccattggtacgagtgttacctcttggttaccctcaccaacggttcaaatgaggccatctcctgctatctctttgtctcacttgccagtttttgctgcttggactgatacttaaaacaagatagatccgtttcatttttcatttttcatttttcgttttatgttatgtagctaaaatttacttttatttctaatttgattccctcagtttaaaaggttttatttattttgatataaagtgtttatgttagattaaattgatcgttttgtcggagggtttacactaacactgataaaatattgattttgatgacattttctaactgtttgtgaccatgttagtgtgataatttgacggaaacatcaatttgatctaatattaataatactttaaagggtcaaggtaaaatttttaaccatgttatgtcatggatgtaatgtaatagaaaatggtggggagtggtgttttggagggatgagaagaaatggttgatggggacaaaagttgggttttgaggtaacatttggcgtttctactgtgccaagacgtgagtggaggaattttggggaattaatgaaaagcagggttggggccacctatctgtcatctttatgtaacaagtgtaacatggcctttacaaacatagccttttggctatatgctggaatggaaatattcatatcttgagggaagaattaattaaaggaggggactatgattaaattccgtgaaatgatgtttgg

SEQ ID NO: 266 - DNA, 3648 bp, Glycine max
acgcagtgacaaagaaaagaaagagggaacggtaaagagaaaggtgtctctgtcatctcaaatagattgccataactccctccttctctctcacaagctcttgcagagtgaaagcgaccactttccgatctcaattaaaagtatggcataatttgcaatggcggaactgaacgaataataataagagataccatagttaagagagagaaacacaaacatggaaaaagctgggcctcactccctgggtacacatagatagagactatggtgcagtgttgcaggttgtagcagaagctctgccaaatagtgttaactttattcgagaaaattattattattattattattattattattctctctctctagtctattatcagtggtaattcagtaatgttgttgcattatagagagagcgtggtctatgtgccagggtgatgtgatgtcatttcactaccttcaaagccagaaaaatgcaacagaaaaagctttcatcccatcacatcatttgaaccatgaatcatgaactagttttctaaactaaaactataacaacaccttcggttgttgttgttgttggctatggcgtttcggtttggactactccttctggtttctcttctttgtttggattcaattagttccgtgaattcacacgtcggagaaacgttgttggagataaagaagtggttcagggatgtggataacgtcctgtatgactggacagactcaacttcttctgattattgtgtttggagaggtgttacgtgtgataatgtcactttcaacgtggttgcactcaatctttcggggttgaatcttgagggcgaaatttcacctgcaatagggagacttaacagcttgatctctattgatttcaaggaaaaccgtttatctggccagatacctgacgaacttggtgattgttcctctttgaaaagcatagacttgtcatttaatgagattcggggagatataccgttttcggtttcaaagatgaaacagctggaaaatctaattttgaaaaataatcagctaattggaccaatcccttcaacactctctcaggttcctaacttgaagattctagacctggcacagaataatcttagcggggagataccaagacttatatattggaatgaagttttgcaatatcttggcttgcgaggtaacaatttggtgggttcactttctccagacatgtgccagttaactggattgtggtattttgacgtgagaaacaatagcttgacgggcagtattcctgaaaacataggcaattgtactactttaggggtcttggatttatcctacaacaagctaaccggagagataccattcaatattgggtatctgcaagtagcaactctgtcattgcaaggcaataaactctcagggcatattccatcagtgattggtctgatgcaagcgcttactgtcttagatttgagttgtaacatgttaagtggaccaatccctcctatcttgggaaatttgacctacacagaaaaattgtatttacatggaaacaagctgactggcctcatccccccagaacttggaaatatgacaaaccttcactatttggaattgaatgacaaccatttaagtggacatatcccacctgagcttggaaagcttactgatttgtttgacttaaatgtcgccaacaacaaccttgagggtccagttcctgataatcttagcttgtgtaaaaacctcaacagcctcaatgtgcatgggaataagctgagtggaacagtcccctcagcttttcatagcttggagagtatgacctatctgaatctttcttcaaacaagcttcaaggctccattccagttgaactttcacggattggtaatttggatacactggatatatcaaataataatataattggttctattccttcttccattggtgacttggaacatcttctgaagttgaatctgagcagaaatcatttaacagggtttattccagcagaatttggaaatctaagaagtgtcatggatattgatctttcaaataatcaactctctggcttgattcctgaagaacttagtcagcttcagaacattatatccttgagactagaaaagaacaaattatctggggatgtgtcttcgcttgcaaattgctttagtctttctctacttaatgtctcttataacaacctagttggtgttattcccacaagcaagaatttttccaggttttcccctgacagttttattggaaatcctggtctttgtggtgattggctggatttgtcttgtcatgggtcaaactctacagagcgagttaccttgtccaaggcagctatcctgggaattgcaataggcgcccttgtgattctttttatgatattgctagctgcttgccgaccacacaatccaacttctttcgctgatggatcttttgacaaaccagtcaattactcacctccgaagctagtgattcttcacattaatatgacacttcatgtgtatgatgatatcatgaggatgactgaaaacctaagtgagaagtatataatcgggtatggtgcatcgagtacagtttataaatgtgtccttaaaaattgcaagccggtggctatcaagaagctctattcccactacccacaatacttgaaagagtttgagactgagcttgagacagttggtagcgttaagcacagaaatctggtcagtctccaaggctactctttgtcaacgtacggaaatcttctcttttatgactacatggaaaatggcagtctatgggatcttctgcatggacctaccaagaagaaaaagcttgattgggatcttcgtctaaaaatagcactaggatcagcccaagggcttgcttatctacaccatgattgcagtccactcatcattcacagggacgtgaaatcatctaatattttactagacaaagactttgagccccatctcgctgatttcggcattgcaaaaagtctatgcccatctaagacccacacttcaacttacataatgggcacaattggctacatagaccctgagtatgctagaacttcccgcctcactgagaagtccgatgtgtatagctatggtatcgtattgcttgagcttctaactgggaggaaagctgttgacaacgaatcaaacctccatcatctgattttgtccaagacagctaatgatggcgtaatggaaaccgttgatccagatattactaccacatgcagggacatgggagcagtaaaaaaggtttttcagcttgctcttttatgcacaaagaagcaaccagtcgataggcctacaatgcatgaagtgactcgcgtgctgggaagccttgtgccatccataaccctaccaaaacaaactgactcaacacaagtgctgctacctgattctcagtcatctgctaaaatgcaatgctacaaagatgaatatgcaaatctcaaaactcctcacttggttaactgtccttccatgagcacctctgatgcacaactcttcctcaaatttggggaagtaatatcacaaaatagtcactgaggattttgataatcaaattgagaattaatgaatcattgtatgttttaagccacaaaggaaaaaaaaaaatgtcatgttttaatgcaatgcgatccgtgtagataatctagg

SEQ ID NO: 267 - DNA, 1785 bp, Glycine max
atgtcattgtcatctctagttagaagacgctcaagcgacgaaataaccaactcggcctcggtttccagtagcctctttccagcatttggcaccaccatctttgatgttgaaggttactcgaagtcgaacctaagaaaatatgtcattgctccctatgaccgtagatatcaattgtggcaaacgttccttgcggcattggtagtgtactctgcatgggcatctccattcgagctagctttccgggaactgttagttgggtcgctgttgcccaagattgctctcaggtacgtcaaaaagttacacttcaccatggatatagcctccactgtgccatttgagcagatacatcaaattctgacgggcaaaccaaccaaaagcgaggtctttggtttcctaattatgcttagactatggcgattgaggcgtgttagcgaactcttcgcaagatataatacgtatttaagtgtgccacctaattttgaaaaaaaagacatacgaattaactacccagcaacaagattttgcaaacttatatgcgtgacgctatttgcagtgcacttcgcaggctgcatgtatttttggttggctgtccaactcaaaacacccaaaaacacgtggatcgggaacaaaacagaggattttaatgatttgagcgtcgggttgggttacacttattccatgtactggtctgttgcaacccttactactgttggctatggagatttctatgcagtgaatttaacagagaagcttttcagtactttatacatgctgtttaacatcggcctcacttcatatataatcggaaacatgacaaatctgttagttcatagctctgtcggaacatttgcaatgaggaatgccttcaacagaatattacaatatgcaaacaaatatagactcctggaaggcttaaaagagcaaatgtcggcacacatgcaattgaagtttaagactgcagagttacagcaagaagtgctacaatacctacctaaaacaataagatccaatattgctcggcatcttttccaaaacatagttgaaacagcatatttatttaaaggagtgtcagaaacgaaagcagaatactacccatctaaggttgacattatcttgcaaaatgagatgtcaacatatttctacattttggtatccggatcactggatgtgttgatgtacaagaatgggtccgaacagtttttgttcaaacttgaatctggaggcatggcaggagaaataggcgtgatgtttaatattccacaaccttttacagtgagaagtagagggctctcccaggtcaaacgaatcaatcatcgtcatttcaagcatatggtgcaaccatttagtgatgatgtgaaggcaatcaactacaactttattaagtattttaagggcctcaaaggcaaggtgctagaagaaatatcatatataacagaattgatgggtgaccttcatgatgagcatttaatgcaaaatgtgggtacagacgatgaagtttcaagatatcaagaagcttcatataaagaaggaagaaaaggaaattccaaaccactgtcaagtccagtccccattagagttaaaatccacggacaccatcccaatgaacacaaagtgggaaacgaaacaacaccaaagatcatacttctcccaaattcggtagaagatcttttcagtgttgcagagaaaaaatttggaaacagaggaagcaaaattcttatggctgacggctcagaggtagaagaattaagcgcaataagggagaatgataagttatatatcctctaa

SEQ ID NO: 268 - DNA, 1217 bp, Glycine max
gctattgataaataatctttttccattattgttattcttgcaaactctagagattgtagcatgttctaagccctatatcaggtcatcacctttcctcaaagggagtcctttattgttgttttttcctcgtaaattatttttactatgtttaaccctgtatctttcctttatcagcacaattcccttccaacacaaccaaagttagatcaacttgaaaagatgaatgtatttaaaatgctggaacgtattatagcattccttcaggtttctaagagcaacatctcacccaatttcaaggagaaactaggttcatatgagaaccatattataaacttcataaatagaaaaagacataagaaagctatgcctccaatgcagtcaaggcaacttcccctacctcatattgattggcaagaagaagtgtatcaaaagattaagtccatgaaagaaaattacttgccagagttgaatgaaatgtaccaaaaatctgctagtaaacttcagcggcatacctcccttccacaacaaccgaagtcatataaactcgaaaagttgaagaaatttatgaagatgttggaatgtgctatagcattccttcaggtttcaaagagcaatatgtcacctaattacaggttgaaactggattcatgtgagaagcagattataaagatcataaatataaatagacctaagaaaatcgtgcctccactgcaatatggacaatttcccccacctcatatgcagtctcattaaaatcaagtgaactctcaattgcaaacaacaaatatgcaaggaggctttgtagcagcaacccagtagaataatatgacaagcatgcaacatatttatctatttggtgtatctataggacaacaaagttagatggattcaatgcagccaattaccaaatcagattcagaaccagaaactgttcttaactgcctgcaacagatttcctgtgagttcactttgacaaaaccctgatagtgttacctaggaaattcgtttttgcactttatttaattgtcatttttattaatcatttagcttgagagacatcaacgagtaaaggaagcttacccttatgcgttctagtgcttttaatttgtttatgacgtacgccaatgttgttgaacatattggacaaactagttgttgctcaaggttcacttgtagttaagtttttgaagttatgtgaaagttgtttaaataattgt

SEQ ID NO: 269 - DNA, 2538 bp, Glycine max
ttttctctttgtattttttcatttaattattatgtactcgcgataaatttagtacagatactaatgttaatttcacaagcagaatatgaatacgtgggcatggaatggtgaaaagacagaaaaatgcaagaaagcattcgaggtgagtcaacaatggctatgacgcacatgaatgcccgtgcctgtcagctgttgagttacgtgtcgaatggacccctttttattgtttgtcggtttgcaataacaaaaacacccacacgccacgtgagccaaccaaaataccaaagaaaagaaaatctacgacggaagcagtcccatcaaacttactatggacgcgcccaccgcataaaatccccaaccaacttaaaattaggtcccagaaaacgcaacacacaagaaaagataccaaacatgatcaagatactgtaattcttactcttattcaccgatttcccccaaatcttccatccaagaattttagggttttctcttccagatttcccccaatcttctccgcctctcttccttttcctttacatttctctctgattgaaacgccacacccatttgagaggatcttttttctagagccaacccaaagtgtgttttcatggggttgttgtgatcttgagaaatttgagagtggtggtagtttgttaatgttatgaggaagaaaaggaaaggaagcaaaactgatgggtctgcggatctggctgttattttggctcctaatcatggctctgcttcgtcgaatttgaagtcccattactcgctggaagattgttgtaggctgaagaagaggtgttgtaaggaggaggatgctgacactgagccggctacttcctttacgaggaggcttgctggcattgctactgccccaccttgtgggacgtcgtctttgatcacgccggggagagggctcaagaggaagataggttgcattgatgttgctacccagatgggcaggaagaagaagatcgaggatgattatgtttctggggagacaatcgggcaaggcaagttcgggtctgtttggttgtgtaggtcaaaggttagtggagctgaatatgcgtgtaagaccctgaagaaaggggaggagacggttcatcgagaggttgagatcatgcaacacttatccggacattctggggttgttacactgcaagctgtttatgaggaagctgaatgctttcatcttgtgatggaactgtgctctggtggtcggctcatcgatgggatggttaaggatggtctgtattcggaacagcgggttgctaatgtactcaaggaagtgatgttggtcatcaagtattgtcatgacatgggagttgtgcacagagatatcaaacccgagaatattctcctcactgcatccggaaaaataaagcttgcagatttcggcttggccatgagaatttccgaaggtcagaacttgactggtttggcaggaagccctgcctatgttgccccagaagtattgttaggcagatactctgagaaggtggatatatggagtgctggagtgctcctgcatgctctgttggttggcagtcttccatttcaaggagattcattggaagcagtttttgaggctattaagactgtcaaattagatttccaaaatggaatgtggaaatcaatatctaaacctgcacaagaccttattgggagaatgctgacaagggatatttcagcaaggatatcagctgaagaagtacttaggcatccatggatattgttctacacggcaaatacattgaaaatgctgcccatcaaaacaaaattgaagaaccaaattggtgccacatgccaacagcttgttgctgtaagggaaccaaggttaggaggaaataggatagataattactcacttagcgagggttcgtcctctgaaagttgctattcagatgatcaggatgaatgtgtgttgattgatgtgcttgcctctgcaatttcacacgtgaggatatctgaaccaaagaggagcagggtgtgtggtcccacaggcccgatagttcaacaaggttcatctaacatgaagcctaacaacctctgtaaagcattttgacctactgacaggctgacaccacttataccactatcttgacgattcttgctgggattatagaatttactttcctcagcacattacatagtgggcaaaagtgaattttacatgctgactcctatggtaggttggcctgggtgccgcggcttcctctccaagttcctttatagtgtgacatctaattgcaatatttttttgtccctttgcttaataacctaataatgattaactgaaataattgtacagcatttgtaaatagaatggtaatgtatcattttcttgctatctctggtttgtgcaaattgaatattttatgctttcaacattatgtgaaccactgaaccagtgagcatgtatatgttcttgggaaaagcatagctcatcccacgaaactgctagtccttcccagtgcaagcaacatgtgtagttattattagttaataatggttgactagggcaatttatatttc

SEQ ID NO: 270 - DNA, 3042 bp, Glycine max
gggcacagccgccctgaggacttcccgcttatccctctgtcaattgcggtttcatttcatgtttcggacccaaacagtaacacacttcacatttatgatttattcaacacagtcaacgaacccttcacaaaacgcatcatcaatcttgttttccaatttccttccgatctgtaaccgtctattgattggattatagcgtatcgtatgaactctagcttgctttcgccatggaaaatcaacagttagtggagacaaatggagcaggttttcaagctgttgagaatctgcgagtagatgatttggaacttgatcaggataaacaatcgaaggaggcaaaggctgagaaaattggtcacgaagacgataaattggatgatatatcagaccagataaatgacggggaagatgcaaggtctaatacaaaagatgagagtgggaatttgcaatctggaactcaaccagaaaacttagagaccaaatctgaaactgaagtcagtactgataagcgagagtattccggtgataagatgggtgcaggtggagatttggagcctaaaaatcaagaaacaaatatagataataattctggacagattgacttggctaaagaagtggctgatagggaatcaacgcagatatttgataagtcagatgaaattcctagcgaggaccacaatttggagcctgtatttgatggaacagaagttccagggatggaagctaaccggagtatgtcaggccgtaggttgaatgatcaggattctccaggtgtggttgagaaggctgtggctctcaagaattttgttaaggagaagagtgcagtggcagtctccaccatgatgcgccgcctttctggaaaaagagatgaaggtaccgaggataatgctgatgatgaaggtaaggatgtttcagacatcccaaaagtcggtgaaaccaaagtggtgtctgacaaggcagtggagaaatttgactggaatcccttacattacatcaagaagtcatctgatgttggtgtggaaaacaaaactgagcagggggactcaatagccatgaaaggaaggattatactgtacacaaaactagggtgccaagaatctaaagcaattaggctatttttgcgtatgaaaaggcttagatatgttgaaatcaacatagatgtgttccccggtagaaaggtggagctggaaaagatttctggatctgcttctgtacccaaggtttttttcaatgaaatactaattggaggctggaatgagctaaaaaacctggatgagtctggtaaacttgatgagaaggttgactttcttattactgaagcaccattatttgaagccccatcaccacctctctctggagaggatgatgtgtccagtagtggaccacttgatgaattggcaattattgtccgtaaaatgaaagaatctattgctgtgaaggatcggctgtataaaatgcgcaggttcactaactcttttctcagctcagaagctatcgacttcttatcagaagatcaatatttggaaaggccagaggctgttgagtttgcacaaaagcttgctgacaaacttttctttcaaaatgttcttgatgaggatatatttgaagatggaaatcacttgtatcggtttttggatgatgacccaactgtggtatcacaatgtcacaacattactaggggcataattaccttgaagctcaagcctttagcagaaattgcatcaagattgaggtttctgtctcgtgctatgtttgaagcctatgtttatgaagatggacgtcgtattgattatacaagtatacatggaagtgaggagttcgcaaggttgctttaacttatctgtctttttccttgcgttagaacttacacttgccgtgcaatattgataatacattcagttatttctagaatttctttacttatacaatttatcgttttaggtatctgagaatagttgaagagcttcaaagagtggaaatatcggattcgtctagagaagagaagcttgcgttctttattaatctttataatatgatggccatccatgcaatcttagtattgggccatccagatggagcactggaaagaaggaaattatttggagagttcaaatatgttattggtgggtcaacctactcactttcagctattcaaaatggcatattgaggggaaaccaacgaccaccatataaccttaagaagccatttggtgtaaaagataaacggttgacggtggcacttccttaccctgagcctcttattcattttgctttggtatatggtacccgatctgggcctgcacttcggtgctactctcctggaaatattgatgaagagttattggatgcagcccgtaattttctgagaaatggaggcattgcagttgatttgactgcaaaggctgtaaatgccagtaagatcctaaaatggtatagtatagattttggcaagaacgaggtagaggtgataaagcatgtttcaaactacttagattcagctgactcagaagtattgttggacctacttgctacttccgagttgaaggtgacatatcagccttatgactggggcttgaactgctagcatgggctaccaaagttctgtaaatatgtcacctagattactgattttccgttatacagattaccaccaaagtaatcaatgtcttatgttaacttttctgcccatttcacttgcctgtatagaatggtacacgaggaagacaaaaataggtctgaggaaaatatttctcttatttcctgaattcctgttctatatgtaccgtctttctacatcttttgctctttattgtttgatgcaacttatgatgatccattacatttactctgcttgaagagcttgaacttgtaatgcctttctcagcctattaaagaaccggttataagcattggtccttggaaattttgacatggattttgtgtaatggaaagacctatcaaagcatttatgaactccaaaaaatggggaaaaaatgaattgtcggattggagatgttcttatgagttgattgcattagatttgag

SEQ ID NO: 271 - DNA, 999 bp, Glycine max
atgggttgctgcgttagcaaatgcaggcccgaatacaaaccctcccaagaagaacaacaacaacataatcaacaccacttcaacttcaaccacgttcaacacaagcttccaatctcatcacaaactccaccaccacttccaccaaccctttactcctcaacaaaaatctcaccctccccaccttctccaacctcttccacttcctcaatctcctccttcacatgcaccacttccaacaccatctcttcagcctcttctttatccaccgcttcctcttccttgagctccaaggacaggtccttctctaacgagttcctctggtcgtgctacaaagacaaccctcacatcatcactcgcatcaactctctcagggatgccacctctctctccttcttgccaccaactaaacctaatagaaagcttgtaaacataaacccctcaccgccaaaacccaacttggcttcactgaataagcgctctccgccaccacaatcgttttccatgccacagaagagggttcgatcaaattctccaacgaacctaacacgacagaagagtttccgaaaggacacggagaggtctattactattaatcatgcttccaacgtgcagagtaggtcgctaattaggtcaccctctcccagcagaagattcaatggagacaaatgtgaaagtgctaatttggctacaacgatgaatagttccaaggttaatggtgttataagtggagttcattcgaattctcatcattctgttttgtcttctaggaggaaagagagtgttaaagcggcgagtcccaataataattgttcacgaagagtatttcattctggtttgagaaacactcgcgagacttcttgcactttgggattgggggttagtcctaaagttgatgaaaccgtggttaaggatgtggtgtctgactatgacatggacttaactctgatggaggatattgacaaccctcttatctccttggattgttttatctttttgtag

SEQ ID NO: 272 - DNA, 1858 bp, Glycine max
aaactttcgtacatatcagtattttcattaaaaatactatattttaaccagtatataagaatcgaggatctctcaggaaatggataaaaaaggttgggtttcttgcgagttgtgtccggtgtgggacttggagttgttgagatgaaaaggtgttggttggttggggtcttgattgtggtggggtgtgcctgcatgttgggcactgttggagttgaagggcaccctgatgaggatctcatagtaagtttacctggccaacccaaagttgagttcaagcaatatgcagggtatgttgatattgatgtcaaacatgggagaagcctcttctactattttgtggaggctgagaatgttcctgacaagaagcctctcactctttggctcaatggaggcccgggatgttcctccattggaggaggtgccttcactgagttgggtcccttttatcccaaaggtgatggacgtggtctccgaacaaattcaatgtcttggaataaagcatccaacctcctctttgtggagtccccagctggagttggttggtcatactcaaacacaacttcagattacaattctggagactcgtccacagccactgatatgcttctgttcttgctgaaatggtaccagaagtttccttcctacagatcaagggagctgttccttactggagaaagctatgcaggacattatataccacagttagctaatgttcttttggactacaatgttcattcaactagtttcaaattcaatattaaaggagttgctgctactaaaataagcataggtgtagatgtctgtatgacttatgaaagaagtttttatttcaacctccctgaggttcagaaggctctccatgcaaaccgtaccaatcttccgtaccaatggtccatgtgcagtggtgtcttaaattatagcgacactgatcctaacatagatatccttccaattcttaaaaagattgttcaaaaccatattccagtttgggtattcagtggagaccaagattctgttgtgccattactaggttctcgaacactaattcgtgaactagctcatgatcttaagttcaagattacagtcccatatggagcttggttccacaaaggccaggttggaggttgggtaaccgagtatggaaatttgttgacttttgccactgtaagaggagctgctcacatggtaccctatgcacaaccttcaagagcactccatcttttcagttcatttgtgcatggaaggagattgccaaatacaacaagtccttcaattgatgattaatattaataattaagctaaactgcacatttggttttcctatttttgtaaaaatgagattttggttcccttggtttctaattcaaacatttggtcccctagtttgaattagaaatcaggggcacaaaattctatttctaccgaaatagaggaaccaaatgtgcagtttaggctaataattaggaaaatagatatctgcctgccatataacgagtggaaattaatagcaggttctacactcaagctagttgattaatcttagatctcaagactttaggctaaaagaggaagcagtgaaagagaagggagtgtctctctaggccattatttatcaatgcatggaaaaagaggggggagtaaaaggaataaaaaagagagagattccattctttgagcctatatattgattctcaagttgcatattgcatgttctacattctttatttggaagcacagacgtgcttaatttattcctaaaccaaatgtacaagaaaaaagtatactctgtttcgcaatttgattattaacatatgtaagcagtcaagttgagagggatttatctttgttttgaaacttt

SEQ ID NO: 273 - DNA, 1830 bp, Glycine max
atgccaccaacagagtcatctacttttgagtctgagagggaacctgtgagatatgtgcacacagtttcagagtcaggtcgacttcttccttcagcgagccgctggaactccatagcactagactttaaacttgctcctaattcttccaccgcctatgaatctatcccttcacaatatccaaaatctgttgacttcaatcttgctatcactgacaggaagcactttcatatttttatttttgttttggtagcaataatttttgccatcttggcagctgttctgctggcacactttttacctcagaagcacaagcatcaagggtcttcaatcaatctcaaactggcaataaaccaggctctaacgttttatgatgctcaaaaatctggacactatccaaggaacagtccagtgaaatttagaggagattcaggattacaggatgggaatttggctaagactgatcttactggtggattttatgattctggcaacaacattaagtttaccttcaccacagcttatactatgaccttgttgagttggactgttattgaatatcatagtaaatatgctgatattggtgagcttgatcatgtgagggacatcatcagatggggtagtgactacctgctcaaggtgttcattcccccaagttcaacagctggatcaaaccttacactgtattcccaggttggaagtaccattagtaataataacaatgagcaaaatgatgtgagttgctggcaacgacctgaagatatgacatatgagagaccagtttcaatttgtgatgcctctgcttcagatttagctggtgaaattgtggcagcattatctgcatcatcgatggtatttgaagaagacaaggattactcaaggagacttatccaagcagcagaaagcctctttgaggcgatcacaagtgaagatcctacagaacacgggacctacaccatggttgatgcatgtggaaaacaagcaagaatgctttataactcaactagctacaaagatgagttggcttggggagcaacttggttatttcttgctactgaaaacgctgattaccttgcaactgcaactgaaatttttttatcagccaagagtgatgaaccaagtgttgacaaaggggttgtttattggaataacaagctcaatgctgtggagattttgcttaccggtattcgattcttccgtgatcctggcttcccacatgaggatgctttgaaactctcatcaaactctaccgatgccctcatgtgttcttatctattcaataaatactttagcaggacacctggtggattgattatcctgaaaccagataatggtccattactccagtatgctgctacagcatcctttctcagtaaattgtacagtgattaccttgatcatctcaaaatgtctggtgcaagttgcaagactgatgcattctcggtggaaatgcttcacgattttgctacttctcaggttagctacatcttggggcaaaaccctatgaaaatgagttatttggtgggctatggtgacaggtttcctctccaggttcatcacagaagtgcatcaatcccttggaataaccaaccctaccgttgtgaagatggtaagaaatggctaaactctaaagatccaaatccacaggttcttttgggagccatggtgggaggaccagacactaatgacaatttcgtggatcaaaggaccaaccaaaagttcactgagccaaacatagcaagcaatgctggcttagttgcagcacttattgcacttcaagatcctccttataattcacgtgacttgaaaaactcattgtggggatggacttga

SEQ ID NO: 274 - DNA, 1830 bp, Glycine max; identical to SEQ ID NO: 273

SEQ ID NO: 275 - DNA, 1570 bp, Glycine max
ggaaactgatagcacaagaatattattaacaaatcaatagaaaggaaaaaaaaaagagttgaagccaaactagctgttttaccagatgtgaagaacaattaaataattggcacggtgggcaaagcaagattcagtcattggttgaaccacttgatcaaaattttgaaaatttctctttctatctctctctatctgggagcaagataatatataattgaaacaattaattgcagttggaagttcaaggtttcaagctagctagaggtatttatataaagcccaattgggtggtattggaagctatacactaacataacatatatgtttgtatataagagaagtggaagagggagagtgagggaaggtaacaataagggaaatgaagaggagcagagatatggagaagagatcagagattaaatctgcaattgaagagttgtctatgctggttatagtcaaacctgaaggaaatcatgtcatgattgctcacatccccaccaagcctttcctgtctctatgtcacttggttctacaagttcttgataagataggaccaacgatggccgttttgagacaagacgtttcccagaatattaagaggttggaagtgatgcatgaattgaatccctcaatgaattcaaatttggttgaaatattgaaatcagaagctagcaaaggcaaatcaaggaagaggtctagttgtagtaaagcctttctttggctcactaggtccctggatttctcctcagcattgttaaaatcactagaaaacgatcctaaaaaggatatggagcaaatagttcaagaatgttatgatgtaaccttgtcaccatggcatggatggatttcgtcagccgctttcagagtaataaccatttgttcctttcttcatttgttcaatcatgtttatgcttttgatggattttacaggctaacctatatgtttcatctcagcttgtctggtccagggaaatttatttattaatttttttacctcatgaaattctgtgctttatgtaaaacttgcctagttaagatcagtgaccaaaattgtgcaattggttcttgctgaactaacagaaatagtactgcaggtggctaaaaaactagtgccagatagtaaaactttcatggatctcctcaaggaaaaagatgaaaactgtgaaaccctaaaggagaaaatgcagatcttggtttccctgcttgttccttttcttgaggatgttcattgtattcttaaagtgtataacttggacaggattaagtcaacctgaagatagaagaactaatgtgcagttttgtgtagggtatattttggcttcattcccccactgttttcatgtaaatagcttgtatagtaaaatcttcgtcaacacagctatgtcgtaattacaagtttggtttctgctgctcgatatagattttatacatcaaatttgtaaatgttgaattccaagttttattgtctacttgaaagatctaatttatggccatgttacatccaagcatgtaaagtttttatttatttataaatgttagtttattagttttgttagaaatgtcaattgga

SEQ ID NO: 276 - DNA, 252 bp, Glycine max
atgatgtccatcttcagccacttcgagatcgcgcaggcccagaactggagcttttctttgctcccagtaaaaagcacgaattcgaagcccaacacagaagccacttcctcctccgctgagtccaaaaccgccagaaaagtttccaatctatcacaacccggtggatccaagcaaaacccgccccgtttgaggcccagatttgcgccggagttggacgggttacactgctttgaatccattgtaccctgctag

SEQ ID NO: 277 - DNA, 874 bp, Glycine max
gcagacacgaataacacacaaatcattaatcaaccaccaccttaacacaacaacacgatgatgtccatcttcagccacttcgagatcgcgcaggcccagaactggagcttttctttgctcccagtaaaaagcacgaattcgaagcccaacacagaagccacttcctcctccgctgagtccaaaaccgccagaaaagtttccaatctatcacaacccggtggatccaagcaaaacccgccccgtttgaggcccagatttgcgccggagttggacgggttacactgctttgaatccattgtaccctgctagatggatttcttcagtctccaatctcaattcagatggcataaaaatcatacgcgattcaattcaatttatttttactgaatagtttaattagtagttgagaaagctatgtactgtacgcgaaagatgaaatgaagaataacaaaaattgaaattacaatctcccagctgagaatagggtctttgaattacctcaatttggatttttatagattggttttatcaaatggactgactagataatttaacaattttcttgaatcgtataatcacgcagtctattttagttttaaaatttatctcacgtgaattcggatgtgtcctaagctatggcattgttaggagtccaaagtacacaatgataaaaattaaatgaacggtaacgaagttaataacattttattggagtattcttaaaaaaaacattttattggtgtagatccttaattccacacagtcatgcttttgttccattaaagtaaaagtcataattaaaagtacattatttttactataagatgtcaattgacaaaagcattacacatccattcaattttaggagatttac

SEQ ID NO: 278 - DNA, 2469 bp, Glycine max
atggcagatgttccaagcaataaaacggatgactatatagtgtgctatgcacctaccatgataacaacaaatggggtgtggcaaggagacaaccctttggaatattctctccctctcttcatcttgcaattgactttggttgtggttgccacccgcatattcgtcttcattctcaagccttttcgccagccacgagtaattgctgaaatcttggttagtggagtgatgttgggtccttcggtgcttgggcaaaaccaagcatttgccaatgcagtgtttcctctaagaagtgtgatggtgattgaaacaatggcaaacattggtctcctttattttctgttcttggtaggggtggagatggacatgacagtgatgcgcagtgttggtagaaaagctgtggcttcagcaatagctggcatggttctaccattcgtggttggaattgtcttctcctaccttttggccgaaagaactgattctgacataaaccaaggcacttttatactattcctcggtgttgctctctctgtgactgcatttcctgttcttgccaggatccttgcagagcttaaacttattaacacagagttggggaggcttgctctttcagctgcactcatcaatgatgtgtgtgcttggattatgttagctttggccattgcattagctgagtctgaagccactaccttggcttctctctgggttctaatttcaagtgcagcatttgtggccgtttgtgtttatgctgttaggccagcagctgcatggctagttaagaaaacccctgaaggtgaacccttcagtgagttttatatatctcttattctagccggggtcatggtctcaggcttcatcactgatgctattgggactcatgctgtttttggagcttttatgtttggtttgtcaatcccaaatggacaactcagttttactcttgtggaaaagcttgaggacttcgtttcaggacttctactccctctcttctttgccatcagtgggctaaaaactaacctagggctcatccatgggtcacacacctggttaattcttcttctagtcatttttctggcctgcattggtaaagttgctggaacgattttggttgcattgttttatcaaatgccaatacatgaaggagctgcccttggtttgctcatgaacacaaaaggccttgttgaaatggttgtgcttaatgttggcaaggaccagaaggtttttgacgaagaatcatttgcaattatggtggttataacagtgataatgactggaattattgtacctgccatatcaataatttataggccatcaagaaatagcatatattacaaaagaagaagcattgagatgtcaaaattagataccgagttcagaatactagtcttctctaatccaacaaagaactccccaatatgtgtgtatgtgctccatttggtggagctgagtgggcgtacatcagccattctcattgttcacaacactgcaaaacaagatgcccctgtccttaatagaaccgaagcacaatctgaccacataatcaaagcctttgaaaactatgagcagcatgcttcatacatctcagtccaacccttaacagcaatctcccgttactcgaccatgcatgaagacatatgcaatttggcagcggacaaccgcgtgtccctcgtaattgttccattccacaaacaacaaacggttgatggcggcatggaagctacaaacatggcatacagatccatcaaccagaatgtgctagcaaatgctccttgctcggtaggaattctagtggatagaggcttaagtggctctaacaacttggcaggaaatcaagtatctcaccatgtagcagtcttgttctttggaggaccagatgatagagaggcattgtgctatcgatggagaatggtcgaacatcccgggattagcctcaccgtaatgcgttttgtccaaactgatcaagtacaacttgagcctttcagccaacaacaacaacatggtagtattgatttccatcaaccaagggtcctcacagtgcaaacagatagggatatacagaagcagcttgatgaaaagctaatacatgagtttaggatcaggtgtgaggatgataattcggttggttatgttgagaagctcgtctccaatggggaggacacggtggcagcaataagaacaatggatgacattcatgatcttttcattgttgggagaggtcaaggggtcatttcacctctcactgcaggactcactgattggagtgagtgtcctgagataggggcaattggggatatgcttgcttcttcagattttgcagccactgcttctgtcttggtgctgcaacaatatgttggggatggttcaccatgtgaaggattggaaacaccaaatgctgaagaacatattactggcattagccatagttccacaccacctccatcaggacataaaatgttcaattcagatcgctag

SEQ ID NO: 279 - DNA, 1523 bp, Glycine max
atacgtttcaagtcgcagagcaaagcaaagcagagccaacaacaagaagaacaaaaccaacatcaacaaccacaagaagaagaagcttgcaaattagaagaatcttcagttgaaagggaagaacacacaagaacaaagagaggaagaaacgcgaatgaagggagaattagagttgccaccagggttcagatttcaccccactgatgaagaattggtgaatcactacttgtgtaggaagtgcgcgggtcaaccaatcgcggttcccatcatcaaagaggtcgatttgtacaagtttgatccatggcagcttccagaaattggctactacggcgagaaagaatggtacttcttttctcctcgggatcggaaatacccgaacggttcacggccgaaccgtgccgccggaagcggctattggaaagccaccggcgccgataaggcgatcggaaaaccgaaagcgctagggatcaagaaagctctggttttttacgccggaaaagcccccaaaggagtgaaaaccaattggatcatgcacgaatatcgcctcgccaatgttgaccgatctgcctccaagaaaaacaacaacaacttgaggcttgatgattgggtgttgtgtcgaatctacaacaagaaagggaagattgagaaatacaacacgaccgcaccgaagatgaatcttgaaatgattcatagttttgagcacgagaacgagacgaagcctgagattcataagcttggaaatgagcaattgttgtacacggagacttcagattcggtgccaaggttgcacacggactcgagcagctcggagcacgtggtttcgcccgatgtgaggtgcgagagggaagtgcagagcgaccccaagtggaataacgatgattatgatctgggcctacagctagaaaacgcgtttgattttcagtttaattacttggacgataataacctttccgtcgacgatgacccctttggcactgttcagtaccaaatgggtcagctctcgcccttgcaggacatgttcatgtacctacagaagatgtgaaaacgatacgttttttttggacaagatgatgggacccgcaaatatctttattatttttttgtagtaaaagtcagcatttgtgtgcaattgcattgcacctaacattttgtggactaggccaagcttagtaaactattcttattctttgttctagagagatcagggaatgtggaattcggttgaaatgagctagtatttggattggatcttggtgtaaagagaacaaaaaaaaaaaaggagaaaaggagttaggtgttgcagtaagtaaaaagtaagccgaatgatggatgataggatattggagggttaatgagtaggtgtaaggaaaattcttgttccattgctattccagtatgattttttcatatattttgtaatataccaacttctgcttttcaattcaaaggaaacaattgaatgaaaaatcttccattcaaaggatggaaatgatggtgcagcctagcctggcctcgagtgttgt

SEQ ID NO: 280 - DNA, 2172 bp, Glycine max
atgtcagcacctagtcatgcaattgtaaaggctgtggctgccacagctggggctatgttacttattgctgcgatatttgtttactttttttacaaatttgttcttgctagataccaccagagacacaaagttggtgcaagtttgcttcgagaatcaggagtgaaccttgagtatattaacaaagttggtggcaatgtgaagggactaattgttgaagaaaatggggtggatgttctttatgtgatggacacagaaagaagaccattgattactggttttccaaatagtatattcaatccaagttacgaacttgatgaggaagaaaagagaatagatataatggtccaaaggtccaaagtatccaagcctgaaattccagaggcatgtgaatctcctagtgttgttggtcatgagaatcaagttaagccagtgtcacaagcatcatcaatttcaacatcactaacaccaagacaaaacttgccacaatcacctcaaccactaccacaatcttcaccaatgattgatgagaacaagaaaactcaaccatcaccaccaccaccaccacctcctcctcctcctcctcctcctccaactcgtcctccaccaccaccacctggtccacctccacttcctaaggccagtggcttcatttcatcactgaaacccccacctgctcccaaagggaaaacaaacataagaagcactaaagagggtatggtaggggagagttcaagagagaagggtgttggtcaaacaaggctgaagcctctacattgggataaggttgcagcaaatgttgatcattcaactgtgtgggatcagatcaatgatggctctttcaggtttgatgatgaactaatggaatcactctttggatattcaagcagctataaaacccaagaaagaaacagaactctttccactttggccaagtccaattccaatgcaccagctcaaatattcattcttgagccaagaaaatctcagaacactgcaattgtgctaagatcacttgctatttctcgcaagggaatcttggatgcagttcttgatggtcagggactaagtgttgagacactagaaagactaactaaaatagctcccacacaagaagaggaagccaaaatcatccaattcagtggcaacccggatcagcttgctgatgctgaatctttcctatacttcattcttaaagcagttccaacagcattcaaccgtttgaaagcaatgcttttccggtcgagttacaattgcgaagttcttcagctcaaggaacagctacaagcacttgaaatgggttgcaaggaactgagaactagtggcctgtttttgaaactccttgaggccattctcaaagctgggaaccggatgaatgccggaacatcaagaggcaatgcacaaggtttcaacttgagttctcttagaaaactttctgatgtgaaaagcacagatgggaagactagtttgcttcacttcatagtggaacaagtggttcaatcagaaggaaaaagacaagctatctatcaaaagcacaaacttcacataagcaatggtgaaacaagcaatgtgaataatagaccttattcatatagcctcatacaacaagaggcagataaagaacatgtattgcttggtttgcaagtattaggtgggctaagtgaagagttatctgaagcaaagaaagcagctagtcttgagtatcataatttcatcactatgtgttcaactctcaatgctcatgttagtgaaatcagacagattataacatgctgtggcaatattaggagtggtggatttatcaatgaaatgaaagggttcctagaggaatgtgagggagaacttgacgtggtgaaagaggagcagacaaggatcatggagcttgtgaagaaaacaaacgagtactatctagcaggagcatctaaagacaacatggtaaacccttttcaactgtttgttattgtgaagagttttgttgacatggtagataaggcttgcatagaactaaaaaagaaggtagaaaagaagaatattgtgggaggagaggctgtgtcaacaacaccacctttgtcaccatcaaagaggacgccgctcagattccctaactttgatttgtattttctatcgaatgtgtcagaaactacatcttctagccaatcagaagatgatttctga

SEQ ID NO: 281 - DNA, 1085 bp, Glycine max
tgggcattaggccttaacctaagtgggatagggttgaataggatggctggctggcacatactgatagctctatgactataaaaccaacccaacccctgcatgtgtgggtgtaaaagaatagaagccatgtctgccattggattttggaattccagagttgcactttcttcccttgtttcttcccactcacctgcatgctttccaaaatgatggggtctttcaattgttgcttgatcatactcaattttgcattgcctgcaaaatccatgtaaatgtgatctatgtttttgtcaagaacacttggacgaacactctttgctgctgctgccagatcaaaacaatatgccactacagcagctgctgctagcagagaaggacacaacccccttcaggagttttttgaggcagacaggagccctgaagatgacaaacctgttgtttatggtcggagttggaaggcgtgtgaactgcgtctgaagtcttgggatgaccttcataagttgtggtatgtgttgttaaaggaaaagaacatgttgatgactcaacgtcaaatgcttaatgcacagaacctgcgttttcctaacccagagcgcatccctaaggtgaggaagtcaatgtgtcgcatcaagcatgtacttactgagagagcaattgaagaaccagatccgaggaggtctgctgagatgaagagaatgataaatgctctttgatggcttaaaatggacctgttcctttagtagcattactgggtatgttgttagaataggacctctacatttgcggatgtaaggttgctaacttgaagcattgtcctaatatattgtttacgaaggagtttacctgtgaatgatttctatttcttgataaagtgttaagtgggttacatcccaaatattttgctgtcctaatttctatttcctacttttagatgtatcaagcaaacaagtgttatcatattatcgtgttagaggttatgcaaaatgttagggaggaagggttgttcctgctttcatgtaataaaaatgtttttccctgttactttaaagggcaacctttgaaaaatgaatagtataattttacctgct

SEQ ID NO: 282 - DNA, 1317 bp, Glycine max
agaagtcatactatctctcgttctctctctttctctattaagttgttactctatttataactcagatatttgagaaggctttaaaagatggtgcttttgggacttctcttggtgggatttctctctcagctgggttcatcagtttcagcttctggttatggttggatggatgctcatgcaaccttctatggagggggtgatgcctctggcaccatgggtggagcatgtggatatgggaacttgtacagccagggctatggaacaaacactgctgctttgagcacagccttgttcaacaatggtttaagctgtggggcatgtttcgagattaggtgtgttaatgaccaaaggtggtgccttccacgctcagttattgtaactgcaaccaatttctgtcccccaaacaatgcactccctaataatgcaggtggatggtgcaaccctccccttcaccacttcgacctttcccaacctattttccaacaaattgctcaatacaaagctggaatagtacccgtggcttaccgaagggtcccttgcctaaagagagggggaatcagattcaccatcaacggccactcatacttcaacctagtcctaatttccaacgttggaggtgttggtgatgttcatgcagtttccatcaaaggctcaagaacaaattggcaaccaatgaccagaaattggggccagaactggcaaagcaacgcctatctcaatggacaaagcctctccttcaaggttacggctagcgacgggcgcaccgtggtctctaataatgttgcaccctcaagttggtcctttggccaaaccttcaatggccatcaattcatttaagcaaacaacatagacccttttacatttaatagctaaaattatagtatttgttggtatatagaagaaaaattaagtaatatgatgatatataggagttgagtgatggaaggggcttattttaggatggtcctttttccttgtcatttgaattgtgttttgtgaggaattttgttctgcctagcatttgaaaaaggcagagatagtttaattagggggcaggggtggatgtttaaggtttacctaccacccgccaatttcgtttgttgtgtggttcgtggtgttatgttatgtcatccacaattggaatatgagaaaaaagtgatatttttctagcttagcgactgagaatagaataggaaagagacagaagcgtttttgcttctataggaagtcattttcttcaactttatgtaatttagtgagtgtaaaagtgagtgtatgacatgtaaggaataaaattacgctccttgttagttccaa

SEQ ID NO: 283 - DNA, 1994 bp, Glycine max
ccaaaatcccctaaacataatcctttaagtgctgaggtggtttggttttccttttgggtctgtcaccatgctcttgctgagttaccttggtaaagtcggcaagacaggtaattgatgcactgaatgcagaagggcaacatatagatatcatactggctgaacttgaccttccgatgaagaagggtatgaagatgttgaagtacatagcacgtgataaagagtttcgcagaatccctgttataatgatgtccgcacaagatgaggtatccattgttgttaagtgcttgagacttggagcagcagactatctagtaaagcctttacgcactaatgaactattaaatttgtggacgcacatgtggagacggaggcgcatgcttggacttgtagagaagaacatcttgaattacgattttgatctggtagtatctgaccctagtgatgccaacacaaacagtaccaccttgttctctgatgacacagatgacaagtccaagagaagcactaatccagaggcaggaatatcagtccaacaagaacaagagtctactattgcaaatgctgctgctgttgagggacctccagatgctcatgcatcagaatgtgggcctgatgtggatggagttaatgatcaccaaacagcacatttttcatctggtccgaagaagagtgaactaaggataggggagtcatcagccttcttcacgtatgttaaagcatcaatacttaagagcaacttcgaaggggttgttaatgtagacaacaatggtgctacgcatgttgggatggaagttatgcatcaagcatgtgctcaacaaggggtgaatagccttcaaatactggaaaatggagaggcatgtgaaagtcaatcgcaagatgacttacccagcagcactagtattcctgattctttgtctattgagaggtcttgtactccacctgcatcaatggaagtttcacagcaaaagcactacagggaagaaaattcacaacagggtgtgatgcatcccagaaatgggacccattgttccgagcatgaagtatctggcatggcttcccaacatgcttatccatattatatttcaggggttgttaatcatgttatgatgccttcatcagcacaaatgtatcatcaaaagaatatccaggacctacagaatcatactagcacagctatgatttcacaatacaatcatcttccccaaggcggtcctcatggaacggggatgacatccttcccatactacccaatgagcatatgcttacaacctggtcagattcctaatcctcattcatggcaatcatttggaaactcaagtccatcagaagccaaattaattaaagttgataggagagaagcagcattgatgaaattcagacagaaaaggaaagagcgctgctttgataagaaaattaggtacattaacaggaaacgacttgctgaaaggcggcctcgtgtaaggggacagtttgtcagaaagttgaacggtgctaatgtggatcttaacggggagcctgcatcaattgactatgacgaagatgacgaagaggatgaagatgaccagggagcaagagattcttctcctgaggatgcttgagcatgtcaaattgctattttgacttaaggatgaagggccaatcaattccttcttgcaactaatattggctgtcaaaagaactccttgctttggaaagttctcaccaaagcatcaatttatgagcttgtgctcatgtatttggggtgttgatccaatatgcacatttatggttgaaacgagctcattctggacattttttaatagcagttcatcaaatgatccgtactattgagctattgcgtaaggtattttacctcctggtggttatgtccaattcagttgaaagtatcacccctgcgttttatattgaatccgttacaagcaggttgttcctgcttattttctggagaaatgtcaagacatctttaaaaaattgaactgagaaatgagttattt

SEQ ID NO: 284 - DNA, 1917 bp, Glycine max
atggtcttcatgttgatcatgatcaatattcagagttggctgcagaagcgaaaggtatggagatttgtgtgtttcttttcatctgttgttggactgctctgttacgctttcagctcttctttcaataatctatttggaaagtggacatggtggaagatattactttacattggttttagtttcattatctgccttactgtcttgtttgcaaaggtttgggagtgctccacctctcctcgggtggaagctcacatggccttttttattttgatgatcacttctgtgtatgcttttttcttcgataaagaagtgaaagggaaaccagacgcatatagccttgtttcatgtgctgcatttgcaatcatgtctttggctttatcaagattgagtcattttggttttgaggttgatctcttacactttttcagtggagtcctaacaatacaactcatgaaaataaagttatggttagtcattgttggaggaagtttcagttattccctcgtcattcttcgttcctctttggttgctgcgagaagtgggtatcatggactccaagatcaaaatcatcatcatgtagtcattgaatttggttcacattcagaatcacagggaaccagaaccagttctagcactactcaagtagatacgtcccaagctattgttatcatggcacaggaagctatttcctctccagaaattgaggatctaggattccaattcatgggttgcatagaggcgcttaagaaggagaaagagaaagttattttcacaattttcaagcatgctgaggaatacctcaaagctagtcttgtccagactccagtgctgcaattgcattgcgatgacaacttggtggtggattctctgccatcagttattatcaatgaccttcgtgaatgtgtaaggctgatggtgacagcagggttaaaggaggaatgcattgacgtgtacattacttggcggagggagtttctgggtgagatgctatcatggttgataaagctcaaaattgcccggttttatataaaagctttgtgcgtagctgataggatattattacccaatgaaagaagactatgtgaatgcgtctttgaagggtccattccccatgaggataaataccctgcattacccggaatacatatgttcgggtttcggaagaagttggacagttatcctggattgcccgaaacaatacatggacgtaagttcggggaattgttaagtcttacttacggtgttaaggagaaagccattgttcccggcggcagggttcatcagattacccttgatgtgctggactacgctgggattatagatgaacagttaacagacctgttagactgcagtttggaaggaaagtttccactgaataacatagccatgataacaaacctgttagacagcagtttggaagccaactcccaaaattaccatgatcctattttgagttacgttttcatcatcaacaatcgaagctacatacggcgaagggcaatgcggggtggattgagacacattcttggaaatgactggattcgaaaaaacacaactagtatcaaagaaaaccttcaactctatctgagaagctcatggaataagatcttggatattttgaagctggacatcaatgagtcagagcctaatgttgcggcacagttaatgaaaaacaagcttcgttccttcaacgaacacttcgacgatatatgcaacattcagtctacgtggtttgtcttcactaaggagctaaggagaaaaataatacaatccatagaaaagatcttgttgccagaatatggaaacttcattgggaggttgcaggattttattggtaaccaagcttatgagcacattgagtatggaatgtttgacattcaagatagactcaacaatttgtttcttgtaagagagtag

SEQ ID NO: 285 - DNA, 3511 bp, Glycine max
atattttccgtctaagaaagaaactgacacaaactctctttcccttaaaatgatttgtttaatttgcttcataacaccccaaaagcaaaattaactacggaatgaacctgctgggaaatgcactgatgtattagcttttgcaccagagcctgaaagcacagaccactctctctggagaatagaagaggtaaagagaaggttgagtttcacatttcatatttaatacactgatcatatagttggcttggagcagaggaattaatgcacacacacacagcgtaaagcaaaagagaatatgcagcgcctaggggaagaggaaaacactgtctggatttgatgtcatgccatcctcccctcctctttttccccttcttttcagcttttcagccgttacaaagtttcctttctttcccactctttgtactttctattctcttccttcgagggccattcaatattattcattgcttaagccaacaagacatggtttgttgtgactcaaacgtgtaacttaactacactaccaagtgcaaaatgaaggatccagaggagcaccaagtgaagtctagaaggcctcttcagaaatctgcagaacgtagaagaaggtgcaggagaaggagccagtgcaagatagagaaattgcaagaagcagaacttgattcacaccttggtttctcttctgccacttgcaagagtcttgtgtttcatcaaaggcctggctttggccaacttggtactaagtgtgtcatcaaagctaaccacttccttgcagatatatcagtttctgacttgagccattacaatgttataataacacctgaagtcacttctcgtaaaacaagcaaggctatcatagcagagttggtgaggcttcacaggaacactgaattagccactaggctccctgtgtatgatggagggagaaacctttacacggctggtttgcttccttttacatacaaagagttcaatgtaacattgagtgagaatgatgatgttacttgtggtaccagggaaagggagtttaaggtggtaatcaagtttgcaactcatgttagcatgcatcagctacgtgagcttcttagcgggaaacaagtgaagaatccgcaggaagctataagcgtttttgacattgtgttaagggagcttgcggctcagagttacgtgtccattgggaggtttctgtattctcctgatgtaagaaaaccacagcagttgggtggtggtcttgaatcatggaggggcttctatcagagtataaggcctactcagatgggattgtcacttaacattgatatgtcatcaatggcatttatcgaaccactacctgtgattgactttgttgctcaaattttgggaaaagatgttcactcaaagccgttgttggatgcagatcgtgtcaagatcaaaaaggccctaagaggtgtaaaagttgaagttacacatagaggaaattttcgaaggaagtatagaatatcaggactgacttcacagcctacaagggagcttattttccctcttgatgaccaaatgaacatgaaatcagtagttgattattttcaagaaatgtatggatttacaatcaaatattctcatctaccttgccttcaagtaggaagtcaaaggaaggtgaactatttgccaatggaggcatgcaagatagttgggggccagagatatacaaaagggctaaatgaaaagcagataacttctctgctgaaggtctcatgtcaaaggccccgcgaacaagagacagacattttacagacaattcaacaaaacaattatgagaataatccctatgcaaaggagtttggcatcagcatagacagcaagcttgcatcagttgaggctcgggttcttccggctccatggttgaaatatcatgacactggaagagagaaagaatacttgccacaagttggtcagtggaatatgatgaacaagaaagttataaatggaagtactgtaagatattgggcatgtatcaacttctcacgaagtgtacaggaaagtgcagctcgtggattttgccaacagttagttcagatgtgccaaatctcaggcatggaattcagtcaggaccctgcgattcctatacattcggctagaccagatcaggtaaagaaggctttgaagtatgtacattctgctgttatagacaaacttgatgggaaagagctagagttgctgattgcccttcttccagacaataatggctctttgtatggtgatctcaaaagaatctgcgaaacagatctggggttgatttctcaatgctgccttacaaaacatgtattcaagatcaatagacagtacctggctaacgtggcactaaaaatcaatgtcaagatgggaggaagaaacacagtacttttggatgctttaagttggaggattccactggttagtgatattccaacaataatatttggagctgatgtaactcatccagaatcaggagaggattcttgtccatccattgctgctgttgtagcctcccaggactggcctgaagtaacaaagtatgcagggttggtttgtgctcagcctcatcgagaagaactaattcaagatcttttccgatgttggaaagatccacagaggggtgtaatgtacggtggtatgatcagggagcttttactatcatttaagaaggcaactggacaaaaaccattgagaataatcttttacagggatggggtaagtgagggacagttctaccaggttttgctatatgagcttgatgccatacgcaaggcttgtgcatctttggaacctagttaccaacctccagtaacatttgttattgttcaaaaacggcatcacactagactcttcgcaaacaatcatgatgacagaaatagcactgataagagtgggaatatcttacctggtactgtggtagattctaagatctgtcatccttcggaattcgacttctacttgtgcagtcatgcaggaattcagggtacaagtagaccagcacactatcacgtcctctgggacgagaacaatttcactgcagatgagattcagtctctaaccaacaatttgtgctacacttatgcaagatgtacgcggtctgtttcagtagtgcctccagcatactatgctcatctagcagcctacagggctcgattctacatggaacctgatgttgctgagatttcaaaactgcgaggaacaagatcgaaagaagggcctgttcgggcactgcctgctctgaaagagaaggtgaagaatgttatgttttactgttgaatatagcagggtgaagaatgttacgttttacagttgaattaggcgtaataagaggcttcaaagtagtagagaaacatcaacatatatagtaaacggaaactaattagaggtgaaaaaattgtccatgttcatatatattgtaagaaaattctgcatggaaaattttgagtgtatctttaaagtcatagttttctctgcgtagtgccgttttaaggtaaggggaaatatccaaagttgatatatattg

SEQ ID NO: 286 - DNA, 1581 bp, Glycine max
atgatgatggaagagtttaagattctttttgtctttctcatgactttgctacttgtgctcaaggtcacaatctcgctctggtggagaccaaggaaaattgagggccatttctccaaccaaggaatcagaggacccccttatcgtttcttcattgggaatgtgaaagaactcgtgggaatgatgatgaaagcttccgaaaaacccatgcctttctctcacaacattctcccaagagtgctttctttctaccaccactggaagaaaatttacggtgcaacattccttgtatggtttggacccactgttcgagtcaccatctctgatccagacctcatccgggaaatcttcacctccaagtcagaattatatgagaaaaacgaatctcccccacttgtgaagcagcttgaaggtgatggactccttagcctcaaaggagaaaaatgggctcaccacagaaaaatcatctctcccacctttcatatggaaaacctcaaaatgttgataccgattatggcaacaagcgtggttgagatgttggagaagtggaaggcaatggcagaggagaagggtgaggtggaaatcgaagtttcggagtgttttcaaaccttaacagaagatgtcattactaggacagcgtttgggagcagctacgaagatggcaaagccgtttttcggttacaagcccaacaaatggtcctagcagctgatgccttccagaaagtgttcattccaggttatagattcttccccacgaggaggaatataaattcttggaaactggacaaggaaatcaagaaatcgttggtgaagatcatcgaacgacgaagaaaagagaatgcgtgtgggaaagaagaaacaaaaaggccaacggatttgctggggctcatgatttgggcttccaacaacaacaacaacaccacctccaatgtgaacgtaacggtggatgacatagtggaagagtgcaaaacctttttcttcgcaggcaaacacaccacttcgaatttgctaacgtggaccacgatcctgctcgcgatgcatccgcagtggcagatacgggcacgtgaggagctcgtgagtgtgtgcggtgcacgtcacatccccaccaaggaggatcttgccaagcttaagacactgagcatgatcgtgaacgagtctctgaggctctaccctcccacaatcgcgaccattagaagaacaaaagccgacgtggagctagggccgtacaagatcccgtgcgggacggagctcctgatccccatcctggccgtgcaccacgaccaggccacgtggggcagcaacgcgaccgagttcaacccgggtcgcttctcgaacggcgtgtcccgcgccgcgcgcctccctttcgccttcatccccttcggcctcggcgcccgcacctgcatcggccagaacctcgcacttctccagaccaaactcaccctcgccgtcatggttcgaggtttcaacttcaggctggcgccgacttatcaacacgcgccaacggttctcatgctgctctaccctcaatatggtgcaccaatccgtttccaaccaatacccgcacccactgtgaattgttactga

SEQ ID NO: 287 - DNA, 2059 bp, Glycine max
gccaatggccctggttaccttttctctgcctcctatcttctttcatccctctgtctgtgtccttctttgcaatgttataaaggcaagaagatactaacctacaaccaaagcctgatatgaagcaaattaagccaaaggctgctctgaactccaaagacatcacacacacacatatataaatatagtgaatttttttcaaggcctccaacacatgatgatggaagagtttaagattctttttgtctttctcatgactttgctacttgtgctcaaggtcacaatctcgctctggtggagaccaaggaaaattgagggccatttctccaaccaaggaatcagaggacccccttatcgtttcttcattgggaatgtgaaagaactcgtgggaatgatgatgaaagcttccgaaaaacccatgcctttctctcacaacattctcccaagagtgctttctttctaccaccactggaagaaaatttacggtgcaacattccttgtatggtttggacccactgttcgagtcaccatctctgatccagacctcatccgggaaatcttcacctccaagtcagaattatatgagaaaaacgaatctcccccacttgtgaagcagcttgaaggtgatggactccttagcctcaaaggagaaaaatgggctcaccacagaaaaatcatctctcccacctttcatatggaaaacctcaaaatgttgataccgattatggcaacaagcgtggttgagatgttggagaagtggaaggcaatggcagaggagaagggtgaggtggaaatcgaagtttcggagtgttttcaaaccttaacagaagatgtcattactaggacagcgtttgggagcagctacgaagatggcaaagccgtttttcggttacaagcccaacaaatggtcctagcagctgatgccttccagaaagtgttcattccaggttatagattcttccccacgaggaggaatataaattcttggaaactggacaaggaaatcaagaaatcgttggtgaagatcatcgaacgacgaagaaaagagaatgcgtgtgggaaagaagaaacaaaaaggccaacggatttgctggggctcatgatttgggcttccaacaacaacaacaacaccacctccaatgtgaacgtaacggtggatgacatagtggaagagtgcaaaacctttttcttcgcaggcaaacacaccacttcgaatttgctaacgtggaccacgatcctgctcgcgatgcatccgcagtggcagatacgggcacgtgaggagctcgtgagtgtgtgcggtgcacgtcacatccccaccaaggaggatcttgccaagcttaagacactgagcatgatcgtgaacgagtctctgaggctctaccctcccacaatcgcgaccattagaagaacaaaagccgacgtggagctagggccgtacaagatcccgtgcgggacggagctcctgatccccatcctggccgtgcaccacgaccaggccacgtggggcagcaacgcgaccgagttcaacccgggtcgcttctcgaacggcgtgtcccgcgccgcgcgcctccctttcgccttcatccccttcggcctcggcgcccgcacctgcatcggccagaacctcgcacttctccagaccaaactcaccctcgccgtcatggttcgaggtttcaacttcaggctggcgccgacttatcaacacgcgccaacggttctcatgctgctctaccctcaatatggtgcaccaatccgtttccaaccaatacccgcacccactgtgaattgttactgattattatgcttgcgtgtttatgtagattaagtgtacattggcttgggttaagggatcggaatcccgctcttggctttgccttgagagtttaaggaaaacatagtagtatgtatgtattaggttttatatcgagagtttgcatgagttttttaaaagtttataagattgccaaaagttataggcatacatggtttttatgtgtcttcaactcaatgtgttaaataactactaaaaagccatcatgctaacgtgactttttccccccac

SEQ ID NO: 288 - DNA, 1017 bp, Glycine max
atgggttccatgggcaaaaagcagcacattttagctcttgtgctccttctctcaatctgcacttcccaagtaatgtcccgcaacctccatgaggcatccatgtccgaaagacatgagcagtggatgaagaaatatgggaaggtatataaggatgctgcagagaagcaaaaacgtttactgatattcaaggataatgttgaattcattgaatccttcaatgctgccgggaacaaaccttacaagcttagcatcaatcacctagctgaccaaaccaatgaggaatttgtggcttcccataatggatacaaatacaagggatcacattcacaaacaccattcaagtatggaaacgttactgatattcctactgcagtggattggaggcaaaatggagctgttactgcagtcaaggaccaaggccaatgtggtagctgctgggcattttcaacagttgctgcaacagaaggtatctaccagataagtacaggtatgctaatgtccctttcagagcaagagttagtggattgcgacagcgtggatcatggttgtgatggaggtctcatggaagatgggtttgaattcattattaaaaatggtggaatcagcagtgaggcaaactacccttacacagcagttgatggaacttgtgatgcaagcaaagaggcttctccagcagctcaaataaagggctatgaaacagtacctgctaacagtgaggaggcactgcagcaagcagttgcaaaccaaccagtgtcggtttccattgatgctggaggatctggtttccaattctactcaagtggggttttcacaggacaatgtgggactcagctagaccatggtgttactgttgttggttatggtaccactgatgatggtactcatgagtattggatagtgaagaactcatggggcacacaatggggtgaagaaggatacataagaatgcaacgaggcatagatgcccaagaaggcctttgtggcattgccatggatgcctcgtacccaactgcttag

SEQ ID NO: 289 - DNA, 2386 bp, Glycine max
ttgttctagagccttagaggctcattttgtttcctctatcatttttggagtatttgatttgatgtgcatatatatatatatatatatatatatatatatatatatatatatatatatatatacagacattacatgtatatatatatatatatgcatagataatcataaaacacatgtaagttttgtgtttgttggtttatatatatagttctctctttcattcttgttcttcttcattcatcttttcatcttcttgtctgagagttgtgttgattgattggtgtgacccaaaaaatggctcaattgccaccaaaaattccaaacatgacacccaattggccagacttctcttctcctcaccaaaagatgccttccctcaaaaccatgtcacctaaccaaaacccttcatgggtggatgagtttcttgaattctccgcggcgagacgtggggcccaccggcggtcggtgagcgactccatcaccttcttggaggcaccattgctggaccaccatcattgcaaaggtggcagtgttggtggtggtggcggtagcggcgacaacgagttcgagaggtttgatgatgaacaattcatgtccatgtttagtgatgaggcttcagggaataataataataataataataataataataataataataataccatgatggaaaacgcgttatcctcttccaacccttctacaccttccgatcacaacagcatcaatgatgagaaggaaatgaacaacaaggaagaggaagggaagaagcaagtgaagaatgagtccgaggaggatgaggatgaaagccaatgcaaacaagaaatcacgcaacttcccaacaatgatgatagtaaaaacaatagtaatgcaaatgcaacatgttctagtgagaaaatcacagaccccaagagggtcaaaagaatcttggcaaatagacaatctgcgcaaagatcaagagtgaggaaactgcaatacatatctgagcttgagcgaagtgtgacttcattacaggccgaagtttcagtgttgtctccacgggttgcatttttggatcatcaacgtttgcttctgaatgttgacaatagtgctttgaagcaaagaatcgcagcgctggcccaagacaagattttcaaagatgcacatcaagaagcactgaagagggagatagagagacttaggcaagtttatcaccaacaaaacataaagaagatggacaatgctgcagggtcaccaccatcccaatccccaccatctccatcaccaaaaccacgatgtgaaactcacactgaaaaggaacagcttatcaatgtttgaagtttgaatttgaaccctccatttgaagactcactcactcaccctttatagactatgatcaaattaacatatcaaccacctagcttgttcaaaaaaatatcaaccacctagtgtatgctagtttagatgatctgtgattcctttcaatattaaaaaagaaattgcagaattttgaaaataggagaaaaggagaaaaaaaatatgtacaaaacttgaatgcatttataggtgattttggtattattatttttttatcagaatctgagttttatctcgataatctgtgtaattcatcaaatgccaacacaaatgccaacacagattaagtaaaaccctaattttgattagaaaataacaccaaaatacctattaaagtgcaattaagttttgtgattagaagaaaaaaaaaatgttgtgtgactgcttgtagttgtaatgtaatgaatgtcatcacgtactgttgggtagagagagggtgagaatttttattaggcaatcgatgatttgatgaagggaaatgttgttaaatgagaagagggtcatcacattacattataatgtggtgtggtgaggccacattggtggtggtaggcttttgctatcaaactgagacagtcacgtgatgtgtttactttaaagaaaagggggaccactcaagttgcatgattgagaatgcagggaaacacatgtgcaccagtgacatcaaagagagggtggaagaaaaaaacagttgtgtctgctttaactagattctttcagttattttttattatttcttattattatttgttttcttcttgattattttcttttaatttaatttttattttttcttgggttttttttcttccaatattcaagttggaaaacaaagactagtgggcgtgtgtgttgggatggatgaaaggaaggtatgtcattatcagtgaaagtctcatggctcttctctgagttttgttgcactttgtgttactgcttttaaggcatgtgattatctttatttgacgagttaatttgagagggaagaaaaatcacagtgtaaatattcagttgactttactcaattctc

SEQ ID NO: 290 - DNA, 1453 bp, Glycine max
cgaatccgtttttgaatagctctagttgcggttgcggatgctttgaggaaggcaataatcatcatagcataaaactttgatggaaggcaataaaatccaatgtttcttcaataatcgcattcaacaccgtactactccttccattcttttcttttcttcattccatagtatattcaatcgtgttttagcgtcgtagactgtcatcttcaaaagctttcaccaatatcatgggatggtacagaaggggaaagcttgctcttgatcgttttcacagcttggcttcaagggtcgtgcctcaaaatcccatttttcagcatagttcaaggatttggcaatctggctatttggattcaggttcaaaaggagctagatttagtgggttgtctttgtgttgttcaatttctcagagactaggagcacaaggtgttgttggagttaacgggaactttcacaatccgtttcttttgggggctaatagattttactatgttgatccttgcaatgtgcgccatttcaagccaagggggccaaggcattggtttcagaattctagacatatttttgttgctgtgatggttggttgggttttaatcactgtgttttttgggaacttggaaacagttccttacaccaagcgaacccatttgattctgttgtcaaaagccatggagaggaggcttggggagagccagtttgaacaaatcaaggctgattttgaggggaaaatattgcctcctatacatcccgaaagtgtgagggtgacaatgatagctaatgaaataattgatgcattgctgagaaggttgatgaaggagcaggggtggaatgattttgggtatgcatcagagcatgctatgccggttgaaggagatggaagggagacattgagtgcattggttggtagtgaagagaaggttgaagggagttgccacaaggagaataagattcttgatggaaaatgggttcgactaagccggaaaaatggtcaggaaagagggtcactgattgctacatcacatttggttggattggattgggaaattttggtggtaaataagccggatcttaatgccttctgcttacctggtgggaagatagttgtgttcactggcttgtttgatcattttaaaagtgatgcagagatagcaactattattggacatgaggatggaagtagaagctgattacatcgggttgctgttaattgcatcagctggttatgatccccgggtggcacctaaagtgtatgagaagttgggaaaatttgctggtgattctacctttggggattatttctctactcatccttctggaacacagagagcaaaattgctggcccaagctaagataatggaagaagcattctctatatatagagatggttcattaattcaacaaacaaaatagaaaagaaaaagtaactggtagcattagcacaaccgggttggtgcaa

SEQ ID NO: 291 - DNA, 3155 bp, Glycine max
cgcctccaccgcgccctcagaacaaaacccaaactgaaactcatcgaagaagaaaataatgaccaacgctcacaggatgtgcgtagcattcaccgtcgccacattatccaccgctgccgccgtcatctacgtcctcttcgccgcgcgaaggcgcaagcagcacaagtcctcgccgtgctatttacactccgaacagaaaccacagtgcgccgcgtttaagcgcgtcgtagcggataattcctacactccgttcaagcacctcatcaacgacgacgagaatgcttcgaattcacatccatatgaggcagagattacggcattgttaaaaaatcctctgcctgaaattgagcttggaactgagatcgcagacttggaaatgaaggattcatatgtttgggttcatactgaaatgcagttaaaggagctggttgatgtgttgagcgaagagaggttctttgctgtggacacggaacaacatagcttacgatcttttttaggctttacagcattggttcagatttctacccgggagaaagattatttggttgacacaattgccctgcatgattttatgggcattcttcgccccatttttgccaatccttcaatttgtaaagtgttccatggggctgacaatgatatagtctggctacagagggacttccatatatacgttgttaatctatttgatacttcaaaggcatgcgaggtgctgtcaaaaccacagaaatcccttgcttatttgcttgaaacttactgcggtgtgacaacaaataaattattacagcgtgaagactggaggcagcgccctctctcagcagaaatggtacattatgcacgaacggatgcacactatctgttgtatattgcaaactgtctgatcaatgaactcaaacaactggacaatgaaaactcttcttccgatgacaaattccattttgttcttgaggctagtcggcgttcaaacatgatttgtttacaacttttcaagaaagagattgaagcttctcctggagaatcttctgcattatcattattttcacgtcgagtgagcagtcatggctttccatcaatttcgaatgaagcccagattcagaatattgtgaggcaactgtgcacatggagagatctgatggctcgtattcatgatgagagcttaaaatatgtactgtcagaccaggcaattgttgctttggcaagtcagccttcagcgagtcactctgaaatatacaacaccatagctcaggctgatatcaatatggaaatgggtgtcaaccctctcatcccttccccatctcctgttgtttgcagtcacctgagtgatatctatcatctgcttgcaaacaagttggataatgatatttattcagtgattctacagaagtgtctgggtcaaaatgggagttgtccactttctatatttaattatgctttgttggtaaacagtaacctaagacctactttagcctataaacaaccgggcccaaaaaatcctaaacaatattctcggaaggcttctcgagatttgtttgttaaaaaattctcttgtaaatctgctgtttatcacaattgccggatctatgctaatgatgggaggctgctttgttattgtgatcggaggaagcttgaatggtaccttagtcgggatcttgcaaaacttattgatgaggaacccccagctataatgcttctttttgaacccaaaggtcgcccagaggacgaaggcaatgatttttatatccagagtaagaaaaatatatgtgttgggtgtggtgaaggaaatcactacttacggtatcgaataatcccatcctgttacagaatacatttccctgagcatttgaaaagccatcgttcgcatgacattgttctactttgtgtggattgccatgaagttgcacatgctgctgcagaaaagtataagagaaaagtagctgttgaatttgggattcctctctaccttcagagggtagttcatccaggtcaaaagactgaaaaacagattgaagagagaggtgtatctcctttacaattacgaacagctgctatggctcttctacgccatggaccaagaatgcctctcaatcgccatgaagaactgactgagattataaagagatattatggaggaagggagatatccgatgaagatctagaaagagctttgcaagttggcatgactcctcatgagagaagacgattcgagaagaagagagggttctcttttaaacattctatagggaatactgctacagtgcaaaaacaggataatcattctagttgcacagccggaatgagtaatgtggatgtagacacattgaaagttgatgctcatgatggctcatatggaaatgaagaaacaagtgaagtagatagagaacatttgactagagaagatgattttgaaaattccactttagcttctgatattacagttaatggaactgcctctgcaacttcgaacagaaatatgatcacagttgaaactacagactacaatgaaagcagtgactctgccataaatgttgatgatagctgtctgagcagtaggcaagaaaatggacttagtgaacataattcaaaactatcactcttgggacatggaccacatgggaaacgagttgtagaatatttactgaaggagtatggtgaagatggcatccgggcgttttgtcaaagatggagacaagtatttgtggatgctgtaaatccacgttttcttcccggtggttgggatgtaaaacacagtggaagaagggacttcgggaagttcagtgtatacaatcctgacaagagaggagctgctgctagtacgtagagactagagtgaccgtacaggaattacaagaaacctgcatattttggtacttcaacgccatcaaaatactcaacttcctcctctcacggcaaagaaactacataaacgttatcttcattttttttgttaattttttgttaaaacaatttagaattttagtatttgtctttttgtaacaaaagtacaaatagctttcaagaacacttttgcccatgctataattattctaatataaaaacacaagcttatggatttacgaaagcaacgttacattgtgactcttgtttcaaagtgtaacccacagcatttaatcgccttgttgagtgattaaataaaa

SEQ ID NO: 292 - DNA, 1676 bp, Glycine max
ctcctatcagggttgtatgggaagattataacttgaattcgacatggtttcaaaattggtttgttcagtcattgcctgtggcatcactctttccctttgtttatttcatggtgaaggattttaatattgcagaaacagaggaagacataagtacctatgctggatatgtgggatcagcaatgatgcttggaaggtctttgacgtccatattgtggggtatggtttctgaccgctatggtagaaaacctgttataattatagggattatcactgttgtcattttcaacacattatttggtcttagcacgaatatttggatggctgttagcatgagatttcttcttggaagtttaaatggtttacttggaccaataaaggcttatgctactgaaattttcagagaggaggagcaggctctaggactctcaacagtggttgctgcttggggagtaggtttagtcattggtcctgcattgggaggttatttggctcagccagtgttgaaatacccacatatatttccaaaggattccttttgggataggtttccatatttcttgccatgcttattagtatcagcttttgcatttgcatcagcaattgcttgcatttggcttccagagacccttcacaaccacaaagataggattgagtccactaaaaatgttgaagctttggaagttggaagcagtgaggcagacaaagacagaataatccaaagagataaaagcatcttccgaaattggcccttaatgtcatccatcattgtttactgtattttttcactacatgatgttgcttaccaggagattttctcattgtgggctctcagtcctttaaggttgggtggtctgaactttacaactgatgatgttggcaatgttcttgcaatatcaggtcttgctattctagtcttccagcttaccctgtaccgattggtgcaaaaagcttgtggacctgttgctctagttcgtatagcaggggtgttatccatacctctcttgcaatgttatcccctcatgacaatgttatcaggcttcacactggacatagtgatcaatattgcctccattctgaagaatgttttgattgaggcaattgctactagtttattcattctgcaaaataaagctgtggaacaacaccaaagggggaccgctaatagtattgctatgactggtatgtcagcattcaaaacaattggtcctgctagtgccggtgcattattatcttggtcgcaaaagcatataaatgattctttcctgccaggcacccatattgtcttccttgccctgaatattgttgaaggacttggagtactgttaatgttcaaaccattcttgagtgtaaagaattaaataccatcagagaagttacactgatatcactaaattttgtacaaggggtgaagaatttgtgcgttaattgcgtgcattggttttgagatcgtagccactatgaatgatgaaataattagagatgattgtgtgttgtacacttgcatcatgtaagtttggactttgattattgagattttaggatgtgtgaactgagtagagttagttaaagtttggacctttatgttgcaatttatgtaacagagtttttttaatatgttctttaaaatctttcattaaaattatgtttatagaattctcttttttttacaagagaat

SEQ ID NO: 293 - DNA, 2901 bp, Glycine max
gaattgctcagtgtttcacgttatttgttgttttatggctccgacaaacttctaagaaatgttggagtaccctgctggtgtttttgtttgaaactttggaaatggtttcacattggagaagagtggtgggagtatcttcttttccagacagaatttgaggcacttcatagtatcaacattcaactaagctgtggttttattgggaaaagagattgataagattctagaggcagatactaataacatgtctcagcattcctcatcttcggttgttgctcttgcaatcaagggtgacaagaaaagcaaatatgtggtacagtgtgcacttaataagtttgttccagagggaatgattattttcaagctgattcatgtccatgctgtgggaaatgtgatccctctttcacaagtgcgtaatgatgtagcaactgcattcaaaaaggaagtggagtggcaaacaaatcaaatgcttctacctttcaagataatgtgtgagcaaagaaaggtgcatgtggatgttgtagtgattgaatcagatgatgtggcaactgcagtagcagaggaagtagctaagggtgccataaccaaacttgttgttggagcttcatctcacggcttatttaaaagtaaacagaaaggtatgtctacgaaaatatcagtatgcacaccaagattttgtacaatttatgctatttcaaagggaaaattgtccatacgcccatcagacatgccgattggtggaagcattatagatgatgccagtgaaagtgaaaccagtttgtccaccagcagctcatctaactacaactccacctctcagacagaatctgcctctgtttcatcatatgctggtttacaatcctcttcgctaacaacacaacgattccaagctctttcaagtataaatagtgctcttctaagcacaaatccaagttttcctgacactaaccattctagaggccaatctctagatcttgggacagaaaatactgctacaagttctgccagaaactcggacattgatcatgccttaagtcgagtctctagttgcaaaagctttatttcagatactgaatcttggatgtatgatcaaaattctagcaaggaagtgcaactagaaactacacttccatcacctaataggcaggcaaaatttaaccttgagctggaaaagttgagaattgaactaagacatgcccaaggactgcatgcagtagctcaaagtgagaaaattgaagcatcccgaaagctaaatgagctaagcaagagacgatcagaagaaaccatgaaaactaaagagattattgctaaggaggagaaggcaaaagatctagcaagactagaaagagataaatatcaagatgcatcaagagaagctgcatatttgaaagaatgtgctgaaagagaagctgcagaaaggaaagaaacagagttgaaagccattcttgctgcaaaagagacaaaaaagctggagggtgctctaagtggttccacaccccagtaccggaagtttgcctgggatgaaatagtcttagctacttcatctttctctgaagatctgaaaattggaatgggagcatatggaatagtgtataagtgcaatctgtatcacacaaatgttgctgtgaaagttctcactctcaaccccaatgaaaaccgcaaaaggaaacaatttcagcaggagttagagattttgagcagaattcgtcatccaaacttgcttcttcttcttggtgcatgtccagatcacggatgccttgtgtatgaatatatggagaatggtaacttggaggacagactactaagaaaaaacaacacttccccaatcccatggtttgagaggtttcgaatagcctgggaagttgcatcagctctcgcctttcttcatagctcaaagccagaacctatcattcatcgtgatttgaaaccggcaaacatcttgcttgatcgtaaccttgtcagcaagatcggtgacattggcctttctacagtgcttcattcagataatttgtctaccatgtacaaggacactgcacctgttgggacactcagctacatagatcctgagtatcaaaggaccgggttaatatctccaaaatctgatgtttatgcttttggaatggtgatcttacagttattgacagcaaaaccagcaatagcacttgctcataaggtggaaacagctattgatggcgggaatttaactgacatattggatacagaagcaggagcttggccatatcaagagacactagagttggctttgctaggactgagctgtgcagaacttcggcgtagagaccggcctgatttacaagatcacgtgcttccaacactagagagattgaaacaagtttttgatagggcccaacattctgcttcaattgttactattaaatccaaacctcctaatcactttatctgtccaatacttcaggatgtgatggatgacccttgtgttgctgctgatggatacacatatgatcgcaaagcaattgaaaagtggcttgaagagaaccacaaatcaccaatgacgaacatggctttacctcataagcatttaattcctaattacacacttctctcagcaattttggagtggaagtccagagaatcgtgatatcagtattatctttctccatgttaatattgagaccattgatttctctgatgtagagtggctagaaagttcagtgggtatggcatttagcagtgtcttggatgcattttttattttatttttttgtagttgtaccattccaagcatgctttctggttaatttaggtagagtgattttcaagtgtagataaatttgattctattggctgattctgtgtatacatgcatatgtcaaatcttgttcttactataaataaaatgagaaccatatttacattcaa

SEQ ID NO: 294 - DNA, 1455 bp, Glycine max
atgggaaattccttggtcttcttattgttcctcatcacattgttgtttgtgggcaatgttcaatgcaacccaaactacagagaagcattggctaaatccttattgtttttccaagggcagaggtcaggaaggcttccttctgaccaacaaatcaaatggagatccaattctggtctctttgatggtcgccttgccaatgtggatttaagtggagggtactatgatgcaggagacaatgtgaaattcaactttccaatggcctacaccaccagcatgctgtcatgggccacaattgaatatgggaagagaatgggaccccaaataaaagaggcaagagctgcaattcgttgggccacagactacctcctaaagtgtgccacatccacacctggtaggctctatgttggtgttggagacccaaatgtggaccacaaatgctgggagaggccagaggacatggacactgtcagaactgtctattgggtctctcccaataaccctggctctgatgtggctgctgaaaccgctgctgcacttgctgctgcatctattgttttcagaaggcttgacccaacatactctaacaagttgttaagaactgcccaacaggtctaccactttgctttgcagtatcaaggttcttatagtcattcacttggatcagctgtttgcccattttattgctcatattccggtttcaaggatgagctgttgtggggagctgcatggcttttcagagcaacaaatgctgtttcctactataatttggtgaagtccttgggagctgatgatcaaccagatatcttcagctgggacaacaaatatgctggtgcacacgtccttctctccaggagagcattgctgaatggtgataagaattttgatcaatacaagcaagaagctgagaattttatgtgcaagatccttcccaactctccctcttcaagtacacaatatacacaagggggactcatgtacaagcttcctgaaagcaacctccagtatgtgacatctataacattcttgctcacaacctattcaaagtatatgtcagctaaaaagcacacatttaactgcggcaatgtcttggtcactccaaacaccttaaggagcattgctaagagacaggttgactacatattaggtgcaaacccaataagaatgtcttacatggtaggctatggtccatactttcccaagagaattcaccacagaggatcttccttgccttcaatagcagctcatccacaaagcatagggtgtgatggaggtttcaacccatttttccattcgatgaatcctaatcctaacatattggttggagccatagtcggaggtccaaaccaaaatgacggatttccagatgaccgcagtgattacagtcattctgagcctgcaacttacatcaatgctgcttttgttggacctttggcatactttgccggtatccgctaa

SEQ ID NO: 295 - DNA, 2570 bp, Glycine max
gaggtccatgcgatgagcttaaaaaatgtttttggtgaggccacgagagaaaaaatgattaaaaatgggaatagttcacatcacaaaatttgtgccagtaacacagtccagtgttggttttgtagagctaccttatgtatatataaatgaatgagcatatgatatagaaaattagaagaaaacataagatatggcaatgttcacgtaccacgttgaaacggttcaatcatggttggcactgagcagacttcacatactgatccacttagtggcagtgttgtcgctgtgttactaccgcataactcacttgttactggaacctccaacagcgccatggcttctgatgaccgtagcggagcttcttctctcggtgctctggttcttcaaccaagccttccggtggcggccggtgtcgcggagcgtcatgacggagaagctgccgagggatgagaagctgccggggcttgacatcttcgtgtgcacgctggatcccgagaaggagcccaccgtggaggtcatggacaccatcatctccgcggtggccatggattacccctccgacaagcttgccgtgtatctctccgacgacggcggctgtgacgttactctctatgggatcagagaggctgctgagttcgccaaggagtgggttccgttctgtaacatttatggggtcaagtcaaggtgtcccaaggtcttcttctctccctttggggaggaggatcaacacactcttcgccacgatggattcagtacacaacgagacctcatcaaggctaaatacgagaagatgcagaaaaatatcgagaaatttggctcagaccctaaaaatcgtcgtattgtgagtgacagacctcctcgtattgagattataaatgaccaaccgggaatgccacttgttgtttatgtgtctcgcgaaagaaggccatcccttcctcacaaattcaaaggaggagccctcaacgcattgctcagagtctcaggtttaatcagtaatggaccttatgttctagcagtggattgtgatatgtatagcaatgatccaacctctgccaaacaagccatgtgcttctttcttgatcctgaaacgtccaaatatattgcatttgttcaattccctcaaatgtttcacaaccttagcaaaaaagacatctatgataatcaatctagaactgcttttaagactatgtggcaaggcatggatggactaagaggtccaggtctttcaggcagcggcaattacttaagtagaagtgctttactatttggaagtccaaaccaaaaagacgactatctgaaggatgcacaaaagtactttggcaagtctaccgcatacattgaatcactgaaggccatccgtggacagaaaagtagcaaaaagaatatttcaagagatgaaatgttaagagaagctcaagtagtggcctcttgttcctacgaaaataacacaaattggggcacagaggtgggattctcatatggcatattactagagagtactattactggctatcttcttcacagcagaggatggaaatcagcatatctttaccccaaaacaccatgtttcttaggttgtgctcccactgacatcaaggaaggcatgcttcagttggttaagtggttgtctgaacttttgttgcttggtgtctcctccaaatacagcccattcacttatggattttcaagaatgtccataattcacaccttcacttattgcttcatgacaatgtcatccctttatgctgttgtcttcatcctctatggcattgtacctcaagtgtgcctcctcaaaggaatcactgtgtttccaaaggccacggacccttggtttgcagtgtttgcatttgtgtatgtatctactcaaattcaacatttgattgaggttctatctggggatggctctgtggctatgtggtgggatgaacaaagaatttggattctgaagtcagttaccagcatatttgcaattatagatggaatcaagaagtggctggggttgaacaaggtgaaattcaacttgtcaaacaaagccattgacaaagagaagctcaagaaatatgagcaaggtaggttcgatttccaaggtgcagctgtgttcatggctccattggtcctattactcatagccaacattgttagcttctttgttggtatatggagactattcaatttcaatgtgaaggattttgaagaaatgtttggtcaacttttcctagtcacctatgtaatgcttcttagttatcccattcttgaggccatagtaacaatgaaaagcaaaagtggatagtgaaatttggtcataaataatcaggctcattcaagagtctaaattgctttttaatcttgagatggaaatgcttaatgccatcttgttcgctctgtttagattaatctaatagcttccttgcacacaatgaagtctctcctcttgattattttattactccgtttttttttatttttacaaattgattagaagattgagcatttcttagttaccctacgtattagtagtacatgtaagcctttttctataataaatcgaactccagggattgttacgaaga

SEQ ID NO: 296 - DNA, 2289 bp, Glycine max
atgtggaggctgaagatagcagatggaggaaatgatccatacatattcagcacaaacaatttcgttgggaggcagacatgggagtttgatcctgaagcaggcagtccagaggaacgggcccaggttgaagcagctcgtcagcatttctaccacaaccgcttcaaggtcaagccctgcgctgacctcctttggcgttttcaggttctcagagaaaataacttcaaacaaacaattcctcgtgtgactatagaagatggagaggaaatcacataccaaaaagtcacaagcgccgtcagaaggggcgcacaccaccttgcggcactgcagacctctgatggccattggcctgctcaaattgcaggtcctctcttctttcttcctcctttggttttttgtatgtatattacaggaaatcttgaatcagtatttccagaagaacatcgcaaagaaattcttcgttacacatattatcaccagaatgaagacggaggatggggactacacatagagggtcatagcactatgttttgtactgcactgaactatatatgcatgcgaatgcttggagaaggacctaatggaggtcatgacaatgcttgtgctagagcaagaaagtggattcgagatcatggtggtgtaacacatataccttcatggggaaaaacttggctttcgatactcggtgtatttgattggtgcggaagcaacccaatgcccccagagttttggatccttccatcttttcttcctatgcatccagctaagatgtggtgttactgtcgattggtatacatgcctatgtcttacttatatgggaagaggtttgtgggtccaatcacaccactcatcttacaattaagagaagagttgtttactcaaccttatgaaaaagttaattggaagaaagcgcgtcaccaatgtgcaaaggaagatctttactatccccatcctttgatacaagacctaatatgggatagtttatacatattcactgaaccgctacttactcgttggcctttcaacaagttgattagagaaaaggcccttcaagtaactatgaaacatattcattatgaagatgagactagtcgatacataaccattggttgtgtggaaaaggttttatgtatgcttgcttgttgggtggaagatccaaacggagatgctttcaagaagcatcttgcaagggtcccagattacttatgggtttctgaagatggaatgaccatgcagagttttggtagccaagaatgggatgctggctttgctgttcaagctttgcttgccactaacataattgaagaaattggtcctacgtttgcaaaaggacatgatttcatcaagaagtctcaggtgaaggataatccttttggagattttaaaagtatgcatcgtcatatttctaaagggtcttggacattctctgatcaagaccatggatggcaagtttctgattgcactgcagaaggtttaaagtgttgtctacttctatcaatgttgccaccagagattgtgggagaaaagatggaacctgaaagattatacgattcagtcaatgtcttgttgtcgcttcagagtaaaaaaggtggtttagcagcatgggagcctgcaggagctcaagagtggttagaattactcaatcccacagaattttttgcggacattgtagttgaacatgaatatgttgagtgcactggatctgcaatccaagctttagttttgttcaagaagctatatccaggacataggaagaaagagatagaaaatttcattaccaatgcagttcgattccttgaagatacacaaacagctgatggttcatggtatggaaattggggagtttgcttcacttatggctcttggtttgcacttggaggtctagcagctgctggtaagacttacaccaattgtgctgccattcgcaaagccgttaaatttctacttacaacacaaagagaggacggtggatggggagagagttatctttcaagcccaaaaaagatatatgtacctctagaaggaagccgatcaaatgttgtacatacagcatgggctcttatgggactaattcatgctggacaggcggatagagaccccatgcctcttcaccgtgctgcaaagttgctcattaattctcagttggaagagggtgattggccccaacaggaaatcacgggagtattcatgaaaaattgcatgttgcattatccaatgtacagagatatttatccaatgtgggctctagctgaatatcgaaggcgggttccattgccttccactgaagtttaa

SEQ ID NO: 297 - DNA, 1568 bp, Glycine max
atacatgtgtgtgtggttgacgtgttcatcctctgcaacggcaacagacgaagttgtttctctctctaggcctagggtttccttctccactaccgttctttcatcggatcgctgccgtttccggcgtcattccgataattcggcggcatgaagctcacagtgaagactttgaaagggagccatttcgaaatcagggttcaaccctccgacactgttatggctgtcaagaagaatattgaagatgtacaaggaaaagataattacccatgtggacagcaattgctgattcacaatggtaaggttttgaaagatgaaactacattagtagagaacaaagtctctgaagatggttttcttgttgttatgcttagtaagagtaaaacatcgggttctgctgcagcttcatctgttcagcctgccagcaatcctgctacgactgtatcaatgtcaaattccacccctccttctgatcctccagtgcaaactcatgtgtctgcagatacctatggtctggctgcttcgaatttagttgctggtagtaatcttgagcagactattcaacaaattatggacatgggtggtggcaattgggacagagacacagttagtcgtgctcttcgggcagcttataataacccagagcgtgctatagattatttgtattctggaatccctgaagcagccgaagttgctgtgccagttcctcaaacagctggtatgtcttctggagcagttcctgtaggacctaattcatctcccttaaatatgtttccacaggagacaatttctagtactggtgctggacttggatcgctggacttccttagaaataacccccagtttcaagcattgcgttcaatggtgcaatccaatccacaaattctacagcctgtgcttcaggaacttggtaagcagaatcccggtcttttaagactgattcaagagcatcatggggagtttctccagttgataaatgaacctgttgagggttctgaaggtgatatgtttgagcagcctgagcaagacatgccccatgccatcaatgtgactccagctgagcaggaggcaattggaaggcttgaggctatgggatttgatagagcctcggtgatagaagcatttttggcatgtgaccgtgatgagcaattggcagccaactatttattggagaatgctggagactttgaggattaaatgactttgggaaggaaataactgctgatttcctggcgaagcttggagttaggagctcgacctctctctctataaattatagatccactcctcccccttatttgcttgcagataccattggggggtaactctgctgcggctttagttctttttcttttttatgtgccaaaaaaagtctctaactcacattacttccattgattcatagttttgtttttaatttttttttaacttaaatgtgacttgttggataatatatggggtagagtttggatttagccatgtgtcatcgaaacagtgtgtttttgcggcgttcaatatgcacgttctacttcggcacttccattttcatgaaagtaacaatctgttaaggt

SEQ ID NO: 298 - DNA, 1136 bp, Glycine max
gattaagaatgaccaagttgtactgctcaaaaaacaaaaaacaaaaaaatggctagctgtcggttttgcacagtatagggatgaattgccagagagagagagagacagagagagactgggggcatttaatctgagcgttacttgctgaagcttggcaaggtcttcccacgtttccggtggctactctctaccactttgtcttgctctgcattgtggaaatttacaaaaggaggatggcaattatccttgcagcaaatatgtgttccattacaaattccaaaacagttgaagtgatcaaaagatttgatattgaagataaactgcaatccagatctaatattgcactgcctcgcctggaagcttcatcaagtcgcaggcatctcttaatcagtgttggcccttcattggttaccttaacatgtggtttatcaccatcaatggtatgggctgaagagaagtctggtgagaaagaggaagaagataaaggggttattggggccatcaaatccttatttgatcctaatgagaaaacaaagtctggaaaggtgttgccaaaggcttacttaaagtcagcaagagaagtagtgaaaacaatgcgtgaatctttaaacgaagtcactgatgataatgctaaatttagacggactgcagactcagcaaaggagtcaattcgggagtatttgggcagttggaggggaaatcagactgttgctcaagaagaatcatatgttattttggaaaaagtaatcagatctttggcaaacttttactcaaaggcagggccatcagctccactgtctcaggaagtaaagtctgaaatattagattatctaaatacagctgaagaatttttgtagaacatcttccaatgtgttataaaaaaaacaacatatctaactccctggatgtcgtcaatggttgtgataaagtaaatttattcttcattcaatttaaattttgattcaaacttgttttcttttttcatgtgaattatacttgctagctttggttgatgattaatccccccttccccaaacaaaaaccagagagaggacaatgcgaaaattgagtctgtatgcttcatgtaatctgtatctcaagttatatcccaagtaaaagagcagatacattcttgt

SEQ ID NO: 299 - DNA, 2598 bp, Glycine max
atgtttggcatcttaggaggcaataaggggcacaagatcaagggtactgtggtgttgatgagcaagaatgtgttggacttcaacgaaatagtgtccactactcagggtggtttggttggtgctgccaccggcatcttcggtgctgccaccggtattgttggtggagttgtcgatggtgctactgccatcttcagtcgcaacattgccatccagttgatcagtgccaccaagactgatggacttggaaatgggaaagttggaaagcaaacctatttggagaaacatcttccttcgttaccaaccttgggagacaggcaagatgcattcagcgtttattttgaatgggataatgattttggaattccaggagcattttacatcaaaaattttatgcaatctgaatttttcctcgtgagtgtcactcttgaagacattccaaatcatggaaccattcactttgtttgcaactcatgggtttacaatgcaaaaagttacaaaagggatcgcattttctttgctaataagacatatcttccaaatgaaactccaactccactagtgaagtacagaaaagaagaattggaaaatctaagaggagatggaaaaggagagcgcaaggaatatgataggatctatgattatgatgtctataatgatttgggtaacccagacaagagcaatgatctagctcgtcctgttcttggagggtctagtgcctatccatatcctcgcaggggaagaactggtagaaaaccaacaacaaaagactctaagagtgagtcaccatccagcagcacctacatcccaagagatgagaactttggtcacttgaagtcatcagatttccttacatatggaataaaatccatagctcaaaccgttttacctacatttcaatctgcatttggtttaaatgccgagtttgataggtttgacgacgtgcgtggactctttgaaggtggaattcatctccctacagatgcactcagtaaaattagccccctaccagtgctcaaggaaatcttccgcactgatggtgaacaagtcctcaagtttccaccacctcatgtcatcaaagttagtaagtctgcatggatgactgatgaagaatttggaagagagatgcttgctggtgttaatccatgcctaattgagtgccttcaagtgttccctccaaagagcaagctagatcccacagtgtatggtgatcaaactagtacaataaccaaagaacacttagagatcaaccttggtggactctctgtggaacaggcactgagtggtaacagattgttcatattagatcaccatgatgcattcatcgcatatctgaggaagatcaatgaccttcccactgcaaagtcttatgccacaaggaccatccttttcttgaaagatgatggcaccttaaagccattggccatcgaattaagtttgccacatcctaggggagatgagtttggtgccgttagtagagtcgtcttgcccgcagaccaaggtgctgaaagtacaatttggctaattgccaaggcatatgttgttgtcaatgactcctgctatcatcaactcatgagccactggttaaatactcatgctgtgattgaaccatttgtcatagcaacaaacaggcatcttagtgtgctccaccctatttataaacttttgttgcctcactatcgtgacaccatgaacatcaatggactcgcaagacaatcactcatcaatgcaggtggcattattgagcaatcatttctgcctgggccatttgctgtggagatgtcttcggcagtttacaaggggtgggttttcactgatcaagcccttcctgcggatcttatcaagagaggaatggcagtggaggatccatcctctccctatggccttcgccttgtgatagatgactacccttatgctgttgatggactagagatatggagtgctatccagacatgggttaaggactacgtctccttgtactatgccacggatgatgcagttaagaaagactcagaactccaagcttggtggaaggaagctgttgagaagggtcacggtgacttgaaagacaagccatggtggcctaagttgaacactcttcaagatctgattcacatttgctgcattattatatggactgcttcagcactccatgcagctgtgaatttcggacaatacccttatggcggtttcatcctaaatcgtccaactctaaccagaagattgctcccagagccaggaaccaaagaatatggtgaacttaccagtaatcatcaaaaggcttatttgagaacaattacaggaaagactgaggcccttgtggacctaacagtgatagagatattgtcaaggcatgcttctgatgaggtctaccttggacagagggacaatccaaattggactgatgacacaaaggcaattcaagcctttaagaagtttggaaacaagctgaaggaaattgaggacaaaatctcagggaggaacaagaattcaagccttaggaaccgtaatggaccggcgcagatgccctacactgtgcttcttcctaccagtggggaaggccttactttcagaggaattcccaacagcatctctatctaa

SEQ ID NO: 300 - DNA, 6795 bp, Glycine max
caacctctccctcaacaaaaaaaataaaataaaagccaaacattttttttttcataaaaaaaagaaaaaaaaaatggttagggtttgacccaagaacgcacaatcgcgtgcgacccacatagtggaatcatcacactcaccgattcggacaacaacaccaacttcgtttctcccttctcttctccgcgcccttccgatctacgattctttagagagagaaaatcggttccatctagagagagagaaagcaatggtggacgctgatgcgttgtgggaaaccaaaagattctcttattcagtgtctcgcttgaattttggagggatgtgagggttttcttttttcattttgtggggtctcttttttttttttttttccaaaaattgaattgaatttattttattttgggagtttttagtgagagagtgatctgaattgggggatttcttcgctggcacgtgtgtgtcattgaaattgtgagctagtttgcatgcaatccggtggcggaggcggcggccggaaccccggagtggggccggcgggccggacggggacgtcttcggccgcggcgtcgccgacttcgtcgtcttcggcgtcgcagttggggttggactctatgcagcagcagcaacaacaacaacagcagcagataggttctaggcagtcatttcaacagcaactgcttagaaagccagaaggaaatgaagcttttttagcttatcaagcagggattcagggggtatttgggaataacaatttctcatcccctagtgccatgcaactgcctcagcagcctcgaaaattgcatcttggttccaaccaggatacccaccaaaggggtcaaggaattgagcagcaaacgctaaatcctgtccatcaagcataccttcaatatgctctccatgcacaacaaagacctactttaggaattcagtcacagcagcacactaaaacgggaatgttaagctctgcatctctgaaggatcaggagatgcgtatgggacatttgaaaatgcaagacattatgtctatgcaggcagcaaatcaaggtcaaggatcatcctctaggaattcatctgagcgtgttgctcgtggtgacaagcaaatggagcaaggacaacaaatagcacctgatcagaagagtgaaggaaagcctttgacccagggaccaaccattggacatttaatttctggaaatatgataagacccatgcaagcaccagaaacacagcagggcatccaaaatgttgtaaacactcagattgcagcttctgctcaattgcaggctatgcaggcatgggcacgtgaacgtaatattgatttatcacatcctgcaaatgcacacttaatggcgcagctcattccactgatgcagtcaaggatggtctcacaatcaaaggtcaatgagagcagcattggtgctcagtcatcacctgtccctgtttcaaagcagcaggttacatctccagcagttgcaagtgagagctcagcacatgcaaattcgtccagtgacatgtctgggcagtcaggttcttcaaaagccaggcagacagctccacccagccatcttggctcaataacgaatgctggtatagctggtaactccagtgaaatggcaacacagcaattcaatgttcgtggcagagagtctcaagctcctccgaggcaaccagtagtagttggaaatggtatgccctctatgcattctcagcagtcttctgccaacacaaacttcagtgcagaccatcctctgaatgcaaaaacttcatcatctggtccagaacctcctcaaatgcagtacatgaggcagttaaaccaatctgctcctcaggctggaggtccaacaaatgaagggggttcaggaaatcacgccaaatctcaaggaccaccaactcaaatgcctcagcaccgaaccagttttacaaagcaacagctacatgttctgaaagcacagatactagcatttaggcggctgaagaaaggagaaggtactctgcctcaagaacttcttcgggctattgttccaccacctcttgagatgcaggtgcaacagccaaatcatgctgcaggaggacaaaaccaagacaaacctgctggaaatattgtggcagaactaataagcccaattgagtccagtgctaaggagccactgtctatacctagtattaatggtcagagttctttaaagcaggaatcctttgtcagagatgagaaatccattgtacccgcagttcatgttcaagctgttgcacctcctgtgtcaaaggaatctgctccaacattatctgctggaaaggaagagcagaaatcaattggatgctctgttaaatcaaaccaggatggtgaacgtgtaaataataatactgttagaaatgagttagcattagataggggaaaggctgttgcaccgcaggctcatgtatccgacacaatgcaaattaagaaacctgcacaaacgagctctgttccccagccaaaggatgtgggatcaaccagaaaataccatggacctctatttgattttcctttctttactaggaaacatgactcctttgggtcatcaatgatgctaaacaacaacaataacttgtcactagcatatgatgtcaaagatcttctttttgaggaaggcatggaagtacttaacaagaaaaggacagaaaatttaaagaagattgaaggtttattggcagtaaacttagagaggaaaagaattaggccagatcttgtgctgaggctccgaattgaagagaaaaagcttcgcctagtagatcttcaggcacgtttaagggatgagattgatcaacagcaacaagagataatggcaatgccagataggccatatcgcaagtttgttaggctgtgtgaacgtcagcgcatggaacttgctagacaagtgcaggcatctcagagagcagtaagggagaagcaactcaaatctatatttcagtggcgtaagaagcttcttgaggctcactgggccattcgtgatgcccgtactgcccgcaacaggggagtcgccaaatatcatgagaagatgttgcgggagttctcaaaacataaagatgatgacagaaacaaaaggctggaagccttaaaaaacaatgatgttgacagatatagggagatgttgctggagcagcagactagcatccctggtgatgctgcagagagatatgctgttctttcgactttcttaacccagactgaagagtatctacacaaattaggaagtaagataacgactgctaaaaatcaacaagaagtagaggaagcagcaaaagccgctgcagctgctgcacgattgcagggtctttctgaagaagaagtcagagcagctgcagcttgtgccggagaggaagtgatgattagaaatcgttttctggagatgaatgctcctagagacagctcatctgtcaacaagtattacaaccttgcccatgctgtgaatgaaacagtcataaggcaaccatcaatgttacgagctggaacattgagagactatcagcttgttggtttgcaatggatgctttctttgtataacaacaagttaaatggaattttggcggatgagatgggtcttggtaaaactgtacaggtcatggcattgattgcttacttgatggaatttaaaggaaactatggcccacatcttataatagtcccaaatgctgttttggtcaactggaagagtgagttttataattggttgccatctgtttcatgcattttttatgttggaagcaaggatcaccggtcaaaattattttcccaagaggtttgtgctatgaaatttaatgtccttgtgactacttatgagttcatcatgtatgaccggtcaaaactttcaaaaattgattggaagtatatcataattgatgaagcacagagaatgaaggatagagattcagttttagcacgcgatcttgatagatatcgttgtcaaagacgtcttcttttgacaggaacaccattacagaatgatttgaaggaactctggtctctcttaaatttacttcttcctgaagtttttgataataagaaagccttcaatgattggttctcgaaaccatttcaaaaggaaggtcccactcaaaatgtagaggatgattggcttgagacagagaagaaagttattattatccatcgacttcatcagattcttgagcctttcatgctcaggcgtcgtgttgaagatgttgaaggctcacttcctccaaaggtcagcatagttctgaaatgtaaaatgtcagctgtccagagtgccatttatgactgggtcaaatcaactggcacccttcgtcttgatcctgaggatgagaaacgcaagcttcataggaatccagcataccagatgaagcaatataaaactttaaacaatagatgcatggagctgcgtaagacttgcaatcatccattgcttaattatccattcttcagtgacctatctaaggaattcattgtaaaatcatgtggaaaattgtggatcctggataggatcctcataaaacttcaaagaactggacatcgagttctacttttcagtaccatgacaaaacttctagacatcttagaagaatatctacagtggcgaagacttgtatacagaagaattgatgggacaactagtttggaagaccgtgaatcagcgatagtggacttcaacagccctgattcagattgtttcattttcctgctcagtattcgagctgctggacgaggcctcaaccttcagtctgctgacacggttgtcatttatgatcctgatccaaaccctaagaatgaggagcaggctgtggccagagctcatcgtattggacagacaagagaagtcaaagttatatacatggaagctgttgttgacaaaatcgctagtcatcagaaggaggatgaactgagaagtggaggcactgttgatatggaggatgaacttgcaggtaaggatcgctacatggggtccattgagagcctcataaggaacaatattcaacaatataagatagatatggctgacgaggttattaatgctggacggtttgatcaaagaacaacacatgaagagaggcgtttgactttggagacattattacatgatgaagaaaggtatcaagaaactgtccatgatgttccctcactgcaggaagtaaatcgcatgattgccaggagtaaagaggaaattgaactgtttgatcaaatggatgatgaacttgattggattgaggagatgacacgttatgatcatgtgcctaagtggcttcgagccaatacaagagaagtaaatgctgctattggtgctctatcaaaaaggccatcaaagaacactttattgggtggcagtattggcatggaatcaagtgaatttggttctgaaagaaaaaggggacgacccaagggaaaaaagcatcctaattataaagagttggatgatgaaattttggaatactctgaagtaagttctgatgaaagaaatgaatatgcacatgaaggagaaataggagaatttgatgatgatgggtatagcgtggctgatggagctcagaccattgataaagatcaactggaagatggtctgctttgtgatgctggatatgaatttcctcaatctttagaaagtgctagaaataatcagatggttgaagaagctggctcctcaggatcgtcctcggacagtcaaagagtgagacagatagtatcaccatcagtttcctctcagaaatttggttccctctctgcattagatgctcggccaagctccatttcaaaaaggatgacagatgagttagaggaaggggaaattgcggtatctggtgattctcacatggaccatcaattgtctggaagttggattcatgatcgtgatgaaggtgaggatgaacaagttttgcagaaaccgaagattaaacgtaaacgcagtcttcgtgttcgaccccgtcatgccactgaaagacctgaagaaaaatctggtagtgaaatggcatctcatttggcagtccaagcagaccacaaatatcaagcgcaactgaggactgacccagaatccaaattatttggtgactccaatgccagcaggcatgaacaaaactcaccatcgttaaaaaataagcgaaccttaccttcaaggagagtagctaatacatccaaattacatggatctccaaagtcaagccgtttgaattgcatgtctgtgccttcacaagatggtggtgaacactccagagaaagctgggaaggaaaacctatcaattctagcggatcttcagcacatggcactaagatgactgaaattatccagagaaggtgcaaaaatgtaattagcaagctccaaaggagaatagacaaggaaggccatgagattgttcctttgttaacggatttgtggaagaggattgaaaattctgggtctgtaaatagcctgttagatctgcgaaagattgatcagcggattgataaatttgagtataatggagcaacagagcttgtatttgatgtgcagttcatgttgaagagtgcaatgcatttttatggtttttcacatgagctatatattctgctaattgagccaaagttcaaaacaaaaatctaaagtatttttagtgaagtccagagactaatcaatcactcctatccttggcattgcatcttttctccttttttggcatatcttatctttaaggtcaggcttctgtttctgcaacatttgctgatagttgtccaaacagtatcaccatattaataatgtttatgatggattctttaactaattcaaacgtttctgtgtttttatatcaagcaaagag

SEQ ID NO: 301 - DNA, 1416 bp, Glycine max
atgttgttgggaaaaccttcacaacttctctttcttcttctccttgttttcatctttgaaattgcatcacattctaatgcataccctttatcaacacataagagatggattatagatgaagccacagggcaacgtgccaagttggtgtgtggcaactgggctggccacctcaaaccaatgatccctgagggtctagacagaaggccattgaaggacattgtttctgagcttgtggagcacaagttcagctgcgttcgcctcacctacgcaatctacatgtggacgcggtatggcaatggcaatgtgaacgccacctttgactctttggatgcacctgaggttgtggaaggcattgccaagaacaacccttctgtgttgagcatgacacatgttgaggtgtttgatgccgtggttcatgagcttggggctcagaatgtgaaggtgttgcttgataaccatgaatgggtgcatggccttactttggcagccgagcacttcagtggaaatcatgctgtcgtggcaatgagtttgagaaatgaattgcatggtccacgccaaaatctacgagattggtacaggtacatgaaccaaggagcactagccatacacaaggcaaacccaaatgtgcttgtggttatctcaggtttgaactatgacactgagttgcagtttcttaaaagtaaaccattgaagataggcttaggtaagaaaatggtgtttgagacacatttgtattcatggtctggaattgggacactcaaattgaaacagatatggacaaaacaaccactgaataggatttgtgccaatagcattaagggaatagaccacagagctgggttccttaccgctggcaagaatgcaagtcctttgatctttacagagtttgggtttgatgagacaggttcttcagtggaagacaacaggttcttgacatgccttcaaacctatcttgttggaagagatttggactggggattgggggcatttcaaggtagctactatacttggcatcacctgagtaaccccaacttcactgacaagttccaacttctacaaaggaagaatcaagaaccttcctcaaaggtccccagcttatatatcttgtaccacccactatctggccaatgtgcccaagtgaatggcaaaaatgaacttgaagttggtagctccgctgaaaggctttcagttgttgtttctgatgagtgccaaagcaaaaacagttcttgggaaactgtctcactatctaaacttcacttggctactacggatcaacatgagaagcaactttgcttacagaaggattctaactcatccagcattgtgacttcaaaatgtatctgcataaaagatgattctcaatgtcttgatgatccccaaagccagtggtttcagcttgttgccaccaatgtgtag

SEQ ID NO: 302 - DNA, 1239 bp, Glycine max
agaggggacattctgtgagagcatccaatagcatcgagtaattcatttgataagaagagttgcgtggcaaacatgctgattgggcattcttttacacgcacagaaaacaacaacatttgtcttattaaaagtatggcaaccacaacaggtttgcaatagctgacttgaaagttgacactgaagatgggagaaactacagaaaggtatgcagttgtgacaggtgcaaataaaggaattggattagagatagttagacaattagcttcagctggaatcaaggtggtgctcactgcaagaaatgaagagaggggtatccaagcactgcaaacactcaaggactcaggtctatctcaccttgtactgtttcatcaagttgatgtggctgatgcaacaagtgtagcttctctggcagattttatcaaatctaaatttggaaaacttgatattctggttaacaatgcagggattggtggagctgtaattaaagacacagattcattcacttcacttctcttgaagcgtggggcagcaccagaagaagatgtgacaaaggcaatcactcaatcatatgagttggctgaagaatgcttgcaaataaattactatggtgctaaaacaactgtagaatcccttctgcccctcctccagttatctgattcaccgagaattgtgaatgtatcatcaactatggggcagttagagagtttgccaaaaggatcatgggctagagaagtcttcagtgatgccaatatcatcactgaagagaaagtggatgaaatattgaagaagtttttgagagatttccaagaaggctcattagaaagtaatgggtggccaagacatctgggtgcttatattgtctctaaagctgctatgaatgcgtatactagaatccttgctaagaaatacccttcattctgcatcaatagtgtttgccctggttatgtcaagacagatataactgccaacactggcctcttaacagttgaagaaggtgcagctagtcctgtgaggctagcattgcttcccaatggtagtccatctggccttttctattaccggagcgatgtggcttccttttgattaggaatgcaatttcatggtttgagggcaatatgcattgcttttacttctcaatttattgagcctatttcaagaacattatagtatgttgtatttggatcacatcattatcatggtttcagtttctgattctgcacaacacaccatgtttattga

SEQ ID NO: 303 - DNA, 270 bp, Glycine max
atgtttacgaccgacatcctattcgtcttgaaatcgcgattcattcacgattcagggacaaaaacgagacaacctccgattcgcatcggtagcagctggaatcctatcgaatcgtgcgatacttatcgtgaatcgtacgatactaactaccatggttccaaattgaaaattttccttccaatgactcctgtgtgtgcgtgtgtgttttgcttccataattatgttcagggtagaatggttgagttcagggggacaggagatgcattataa

SEQ ID NO: 304 - DNA, 6054 bp, Glycine max
ttatggaagatgaaggaagtttctaaaaccgccaacccttgttgttacttattcatcggcggatgatagagcttttcttgttctgctttcctatgatatggattcggttgattctcctgtggtatcgactgcctttgttcggctgagacttcagcgtctgcggattctctagtagctgctatagcatctgcttcgtcgggtgctgaatcggatgctttatctacgcggtttgaaactctttggaaaagaaaatgctttgcccaggaattctaggttgaaagccctctctgaccaaaaaaaccaggaacgaaagtcttcatcctaggctttggaatcaatcaaaagagccggagtcgagtaaggatacaacgcatcagtataagctgctacagcatcaggcagggcaaaggtactttccagacctgaatctacaaaagatggaacctaaataagaagccagatgaaagggtcactaccatttgtcacggttacgatgtcgtcgtgatccttgatactgcagaaaaatatagagaaaatgggactcatgcagttgcaattactactgcatttgcatgtagtctcgatgagtaaaaaaactttaccttgaggccgcaatctaaaaccatgtttacgaccgacatcctattcgtcttgaaatcgcgattcattcacgattcagggacaaaaacgagacaacctccgattcgcatcggtagcagctggaatcctatcgaatcgtgcgatacttatcgtgaatcgtacgatactaactaccatggttccaaattgaaaattttccttccaatgactcctgtgtgtgcgtgtgtgttttgcttccataattatgttcagggtagaatggttgagttcagggggacaggagatgcattataaatttgtgagcaacataattggcattacatgatttatgtatatctcttggagtgtctgatacccatgtctctctggagaagcagttggcgaaatgatgctcaggggggaagataactgaaggaagaaaagaaaaacgacaatgggaagttgagatggtcaagatttgttcttcttctggtcaaagatgtgcaggaactgaaggatttttggaaacaagaaaaaattcaacctttctgcccttataagaaaaatggaaaatcagcatcaacaaactcaagaagtagctggatgaatgtgaaaagattctagctaaaccagtgaataccgagagaagaactatccaagaactttgacagtgaaggcagtgggtcttcaaatgatgcctcaaaaacaaaagggaaagtctcaagctttaacctttcaaaatgtgtgaagtgttttcttttatctaactcacacggttggctttggatctcttggtaccattaggagtttaggagaatattgaacaaatgacagtaaaattgtatcgatctttggatcttataatttaggttatagttgagcttacgctagtgaatatatgtaatccaatattaggtttcattaccttactctagatgtgtcagaggaaagatcccattattttatcagcttctctctttattcctttagccatgtttagatctagttttctcttttcaattagctgttattctcagtatgagttctttatattgcccaatccataactactatccatattatactgtcttatgtgtagccagaaccaggggattgcattggatgcatcagaagaaactttacaatgtaaacaatagcatgcagtgatgataaaattctattgtcaaattcttgctttcaatgctaggtctactacagtctgtatcaaaatagagttttgacactgaaactctgcaagtttgcaattccaaccagtcatgaaacgtcaactgagtgactgatattggcattgcttttacaaaactgtagattttagtgttttctacaagtaatgatagcgctatttggccagggttgataatggctttaaaataaatgaaacttagtatgagtgcttcagattcttcaaagaatattactctgtaattgcatggtcttaccacacagaatttggaattttcagttgaagaggttggattcatcttcagcatgacatttctaagtaaacatcctgctgcctatatatgaagtggtaagataaataggtggttgatatttggttctcatttgggtgatactattcaatgctaatgctacaccaatacaccatgtatatggatcttgatttggtacttgaaatatgaaggaggcacaccatacaaagtgacccaagtcaatttaacccaatgcatcaacgtgttggctagcccaatggttgatcattgggttccctaatctctcatgttaaaaattattggaatggtgtattggaagctggtgttggcaattgcagggtgggtattcatgcttcttgtcgtgattattagaatcttacaattcatgatttggatcacatgattcaatacgaattgggtagccaacaattcatatcatatgataaatcatagataactttgaatcttgctatagatagataaattagttcaatttcatatcattgatacaaatcacatgattaatctattaaatgttttttattttttagttttctttcactatttcttattgaagacatcaatgagttagataagtttagtttaaattgttcaatgaaccggaattgaaggagcattattgaatgcaccttatttaattattcaaatgttttattttcattctctaagacaaggatttcacaccgtcactcttttttatgcattatattctgtttttctattttagtcccttgaaataaaggtttcactcactcaattgtgacttatgattttgtttcatgatattgatgataattttctagattaaaattattacattgagtactatacatcatttatcatttgatatattttagccatttttattgtctttgaattttacaatttgatatcatttatgattcataaattagcttaacaattcatttaatggaaatttaataacctcggttatgaatttaagattgtactatattttctaaattcatttatttcattgtattagccgttagtcaaatgcctatttatttacttctatccttagcgaattacacaagtttaggttataaacagaagtgcaaagctagaaaccctaggaattcatcagatccgccgcatcttctcttttgcttgggtttgcttgggtataggtgagtacctgacaagaatcatcgggttcaaaagattttagtagcgcttgttgcaggtaagttctctagtttctttatttttcttttgaaggtagttcgcacaccttctctgaaactttgatttttaatcgtgctgaatgacgtcgtgtgatccatgtagtcaacctcttttagtgggataaggctttattgttgttgttgttgctgctgcagttcactcaccttttgtttttatatattaatgttaaaatagtttcctggatcatataattaacttgagttgatttatatatagtgaaattttagtgaaacatttttttctcaattctttaggtgttcccttaatagttgtcattaaggttttaagttatggtagtggttgcatcattgttgcattgtgactgttgtgggacacaaaagtgatatgatgtggttgtagaatcacttcaaatcaacattaagtgatgttaaaaccttaaaccttgtcttgtctatatccttatccacgcctcatttcttttgctacacgatcggtgcttgagatgtcacatgcccaacaagtcttttcagtgagggaatttctggtggaacggtgaaatgcgtagagattggaaagaacaccaacggcgaaagcactttgctgggccgacactgacaccgagagacgaaagctaggggagcgaatgagattagataccccagaagcgtagatccggagattcccgatataggtcaacctttcgaactggtgctgaatccacgggcaggcaagagacaacccggtgaactgaaacatcttagtagctagaggaaaagaaagcaaaagtgattcccgtagtagcggcgagcgaaatgggagcagcctaaaccgtgaaaacggggttgtgggagagctatataagaaaggcttatggtggatacctaggcacccagagatgaggaagggcgtagtaagcgacgaaatgctttggggagttgaaaataagcgtagattcggggattcccgatataggtaaacctttcgaattgctgttgaatcctcgggtaggcaagagacaaactggtgaactgaaacatcttagtagccagaggaaaagaaagcaaaagcaattcccgtagtagtggcgagcgaaatgggagtagcctaaaccgtgaaaacgggtcctagccgtaaacgatggatactaggcactgtgcgtatcgacccgtgcaatgttgtagctaacgcgttaagtatcccgcctggggagtatgtttgcaagaatgaaactcaaaggaattgacgggcgcccgcacagcgtggagcatgtggtttaatccaatgacaagcgaagaaccttactagggcttgacatgccgtgaatcctcttgaaagagaggggtgccttcgggaacgtggacacaggtggtgcatggttgtctacttttttcacccccatctatgtcgtcacacgggggcgacatggatggggtgaaagtggaaagagagggatggggtttctcttgcttttggtatagtgggccccagcgggaggtctgcatgacgggctaagggctctcagccacatggataatttaatgtactcatcgagacgtggatcatccaaggcacattagcatggcgtacttcctcttagaatgtgagtttgggcctaactcaaccccaaaagttagcttaagtggtgagggttgcccctcacttatatactctaacttgactttatttctagtcgatgtgggacttgggtttcccaatacaccccctaacgcccaacacttcttgggcttgatgcgtggataacaatgatgggtgaccctttgaattaatcttggagatggtctgacaccatcttagaatcttagaatgtgagtttaggcctaactctaccccaaaagttaatttaaggagtgtgggttgcccctcacttatatactctaactttactttatctcttgaaattttagaatgtgagtttaggcctaactcttcccctaaagctaactcaaggggtgttccttacttatatactttaacttggatttatttttagccgatgtaagacttaggttttttctattacactccctcatgcctaacacttcttggatatgctctgatatcatcttagaatatgggtttggcaaccgcaaaaactagctcaaggggtgagggttgtccctcacttaaatattctaacttggctttatttttagccaatgtaggacttgggtttttcctaatacttcctaactctacaaggttacccatctcaaatcgctccaagtcaagtatgtctaactaaagaatttttaagtgatggattatcaaaaagtagactcatgttgttggtatatgtagcaatttatcagtaccgtatgatttgcgatacaatacatatgattcaagtagttggcaatacgaaccggtgagctaatcattttggtgcatgaattgcaagaatcacaacctaaagaagaatcacacaattcttgcataggttgaggccttggaaggagttgtgataccctattgctcctccaagggtcgttgtgcctagccatcattactggagtagtgcttttatcgccaaaattgcaaaaagtgttggttgtagtagacaaattgcattgcactatagttcttactcctttcaatcatggtcaaagaagagagatgacccaattcacaaccctaaccgtaaacaatgacttcttttttcactttagcaacttttgtgttttagttgcaagatataaaccgtgtttcaactttggactgtcagttttaacttattgattgatatttaagtattgactggtatcaaata

SEQ ID NO: 305 - DNA, 1191 bp, Glycine max
atgctagttcctcatccttcaatgctaattgcacctcaaaacaccgtagaaaatcatgacaacatcatggaaggacagaaactacactttgatggatctttgatgccaaaccaatccaacataccctcccagttcatatggcctgatcatgaaaaaccatgcctaacaccaccagaactccaaattccacccattgacttgaagtgctttctctcagcagatccacaagctttgtcaacagtttgtgctgaattgagtgaggcatgcaagaagcatggcttcttccttgttgtcaaccatggagttgatagcaagctcatagctcaagctcataagctcatagatgatttcttctgcatgcaactctcacagaagcagaaggctcagagaaagattggagaacattgtggctatgctaatagcttcattggaagattctcctccaaacttccttggaaggaaacactttctttccattattctgcagataaatccagaaaaactgtggaggattatttccttaatgtcatgggggaagatttcaagcaatttgggagtgtgttccaagaatactgtgaagccatgagcaaactctctcttgggataatggagcttctggggatgagcctaggagttggcagggaatgtttcagagatttcttcgaaggaaatgagtcggttatgaggttgaattactacccaccatgccaaaaacctgagttagctttaggaactggacctcattgtgaccctacatccctaaccattctccaccaagatcaagtcgagggcctccaagtctttgttgatggaagatggtactctgtcgctcctaaagaagatgctttcgttgtcaatattggcgacacatttatggctctatcgaatgggatgttcaagagttgcttgcatagagcagttgtaaacaacaaaattgtgagaaaatcacttgctttcttcctatgtccaaatagagacaaagtggtcacccctccaaaagatctaatcagctacgaaaattcaagaacatacccagatttcacatggccaagccttcttgaatttacacagaaacactacagatctgacacaaaaacacttgatgctttctcgagatggctactagaaaaaaacaatccgaacaggggtgcccccacaaatgttccatggccaacaaaatctataaactga

SEQ ID NO: 306 - DNA, 1388 bp, Glycine max
taaatctgagagaagaagagaaagcaaaatatgttaatgagaatgaaatgattctcctgacaaaaactgttaaacttagtgagtactgagtagggagttgccagccatgtccgttgaactcaagctctctcgttccaatcgtatctatcgcccttcggaagctctggaaggcaaaatcattgtcaaaactcagtcttcaatttcccactatggaattcgccttactgtcaaaggatccgttaacttgcaggttcgtggaggatcagctggggttgttgagtcattctatggtgttattaagcccatcccaattgtgaataggaccattgaggttaaatcttctggaaagattggttcgggtacatcggagataccattctcagtgaatcttagacagcgggatgaaaatttagaaagattttatgagactttccatggtgcaaatattagtatccagtatttggcaactgtagatatatctcgtggatacttgcataaatcattatcagcaacaatggagttcattgttgaaagtgataaagaaaattcagctgatcttcaacaacaaccactttctccagagatggcaatcttttacattacccaagacactcaaaggcatcctctacttcctgaattaaaatctggtggatttcgggtgacaggaaaaatctctactcaatgttctttgtctggtcctattagtggtgagttaactgtagaaacatctgcagttccaattcattctattgacattcagttgtttcgagttgagtccgttcttcttggggagaaaattgtgaccgaaacctctctggtccaaacaacacagatagcagatggagatgtgtgccataatttgacgctgcctatttatgtaatactaccacgccttttgacctgtccaacaaccttagctggtcccttctcagttgagttcaaagttgccatcgttataagctttcagtcagagctaagtaaactgcacaaaaaatctgacgccaaaactccgagactatggctggcaatggaaacattactgcttgagttggttcggacaaagtaagatgatttaattgtgtggtttatcaaaatatgaatatgtggataaatatggaacatggctttactcatgcaacattttagataggtttgagtaaattgggtatttgacttctcaagtttcatgtaatgtagctcaatcttttactgcagcattgcattgagaaacatttcttaatctctggatccaaactaagcgattcactctgatagaaaatggtagttattttaaaaattatcacgggtggatctagaacactagtgagagaggtggcaagtactattttttattttaatttaaattttaaactttaatacattattat

SEQ ID NO: 307 - DNA, 3239 bp, Glycine max
atgggagaggggtccgtggaacttgaggctattgtaaaggaagctgttgatctggagaacattcctcttgaggaagtttttgataatctcaaatgcacaagagaaggtttaagctctgagcaagtacaacagaggcttgacttgtttggatacaataagcttgaagaaaaaaaggaaagtaagatactgaagtttttgggctttatgtggaatcctctgtcatgggttatggaagctgccgctctcatggccataggcatggcacatggagggggcgaaggtggagattatcaagattttgttggcatagttcttttgctacttataaactccaccatcagtttcatagaagaaaacaatgctggcaatgcagctgctgcccttatggccagattagctcccaaagcaaaggtacttcgcgatggaaaatggagtgaagaagacgcttcagtgttggttccaggagacataattagcatcaagcttggtgacatcattcctgctgatgcacgcctccttgaaggtgatcctttgaagattgatcagtctgctcttactggagagtcacttcctgtctccaaacatcctggagatggagtatattccggttcaacttgcaagcaaggagaaattgaggcagtagttattgcaactggagttcacaccttttttggaaaggcagctcatcttgtggaaaacacaacccatgttggacattttcaaaaggttctaacatctattgggaatttctgcatctgttcaattgctgttggtatgatttttgaaatcattgtgatatatggaatccataaaaagaaataccgaaatggtgttgataacctgcttgtgctattaattggtggcatccctattgcaatgccaactgtcctttctgttacaatggctattggttcacacaagttggctcaacagggtgccataacaaagagaatgactgccattgaagagatggctggaatggatgtgttatgtagtgacaaaacaggcacattaactcttaacaagctttcagtggacaagaatatcattgaggtttttgctaaaggggttgataatgatatggttgtacttatggctgcaagagcatcaaggctagagaaccaagacgcaattgattgtgctatagtttcaatgttggcagacccaaaggaggcacgagctggaataaaagaagttcacttccttccattcaatccaactgataaaagaactgcacttacataccttgatgctgctggtaaaatgcacagggttagcaaaggtgcaccagagcagattctcaatcttgcacataacaaatcagaaatccaacagagggttcatgcaattattgacaagtttgcagaacgtggacttcgttctcttgcagttgcccgccaggaagtacctgagggaactaaagacagtccaggaggaccatgggagtttgttggccttctccctctttttgatcctcctcgccatgatagtgcagaaacaattagaagagctcttgatcttggcgtgagtgtaaaaatgatcactggtgatcaacttgcaataggtaaggaaacaggaaggcgtctagggatgggaactaacatgtatccttcttcatcactgcttggtgaaaataaagatggattgggtgctgtcacagttgatgatctcattgagaatgctgatggttttgctggagtttttcccgagcacaagtatgagattgtgaagaggttacaagctagaaagcacatttgtgggatgactggtgatggggtgaatgatgcccctgccctaaagatagcagacataggtattgctgtagcagatgctacagatgctgccagaagtgcttctgacatagtcctaacagaacctgggttgagtgtgatcataagtgcagttttaactagccgtgctattttccagagaatgaaaaattacacaatatatgctatatctatcactattcgtattgtgcttggtttcatgttactgaacagcttttggaaatttgactttcctccctttatggttcttgtcattgccattctcaatgatggtaccatcatgacaatatctaaagatagagttaagccttctccacttcctgatagttggaagcttagtgaaatttttacaactgggattgttcttggcagctatctagctctaatgactgtgatcttcttctatatagttgttgaaacaaacttctttcctgaccattttggtgtgaaacacttttcctataatccagatgctgatataaaagatccaaccaaaagaatgttgggatctgctgtctatcttcaagtcagtacaattagtcaagccttaattttcgtgacacgctcaaggggttggtcctacacagaaagacctggtcttttgcttgtcactgccttcatcattgctcaagcgattgcaactgttgtatctgccactgtcacctggcaacttgctgggatcaaaagtattggttggggctggacaggagtcatttggttatacaatactataacttatctatttctagatcctttaaagtttgctgttcgttacgcattaagtggaagggcttggaatacagtgataaaccaaaggactgcattcatcaacaaaaatgactttggtaaagaagctcgtgaggctgcatgggcaaccgagcagagaaccttacatggcctccaatctgctgagtcaaaagggtttacagacaagcacaccttcagagaaattaatacattggcagaagaggctaggaggcgtgcagagatagcaaggttgagagagcttcacactctgaaaggtagagtggaatcatttgccaagctaaggggtctggacattgatgccatgaacggacactacactgtttaagactttatgactgctatctatcatcattatgatgtcatgtaactctttaaatttcttgtactatggctttgtctcgtgtcagactacaggttttacttcaacaatgtatctgctgaattttcttgtacttttcattcaaatcattggttgttgttcacttgtttgctcttttccattttgtctttcttcttgggaaaattgtacctattgtgttacaataatgttatttacacctctattgggaaagtaaaatattttatttgtaaacttttcttagtgttgcaagaaaatgtgtatggaaaaacttctgaacaggacattgaagtaataaacaaataaatggatgtcatgttctt

SEQ ID NO: 308 - DNA, 678 bp, Glycine max
atggcagctactcaggaagatgtgaagcttttgggtattgtgggaagcccatttgtgtgcagggtccagattgcccttaagttgaagggagttgaatacaaatttttggaagaaaatttgggcaacaagagtgatttgcttctcaaatacaaccctgttcacaagaaggttccagtgtttgttcacaatgagcagcccatagcagagtctcttgtgattgttgaatacattgatgagacatggaagaacaaccccatcttaccttctgatccttaccaaagagccttggctcgtttctggtccaaattcattgatgataagattgtgggtgctgtatcgaaatctgttttcacggttgatgagaaagagcgtgagaagaatgttgaagaaacatatgaggctcttcagtttcttgagaatgagctgaaggacaagaagttttttggaggagaggaatttgggttggtagatattgctgctgtcttcatagcattttggatcccaatttttcaggaaatagcagggttgcagttattcaccagtgagaaatttcctatactctacaaatggagccaagaattccttaaccacccttttgtgcacgaagtccttcctcctagagacccactttttgcctacttcaaagcccgctatgaaagtctttctgcttcaaaatag

SEQ ID NO: 309 - DNA, 3972 bp, Glycine max
caattttcatttgtgcaaaactcccgcctctctctctctctcaaaattcagtgacatcattcaacggaacttcgtgaagctgaagatgttcttcaaggttgcttgattggtgattccttggttctccaacgacaatgaagcccactcgcagactcaacaaaccccataccgtctcaaagctggttttggaggaggtcattgggttgacaacaaagaatggcaatgggctagcgtcaaatgccttgagttccaaatgtgcttatttggcaggttctgtggtggtgatatatgacatgaatttgggcactcagtcacacctcatggtgtctaatagatcaccaaagcctttgagttgtgtagctttgtcacgagatgggtgctttgttgcggctggagaggcaggaaaccagtcatcagtactagtatgggattcttttactttatcccttgtctctgaattgaaaggtcatgtatatggagttacatgcatctgtctctcacccaatgtattctgtccaaggtaaacatctggtatctgttgggggatatatttacctctgggactggcggagtggtgaactgataacaaagcttcaagcaacttcatcttgttcaactatttcaagtgttagcttctcatcagatgcaaaattttttgtaactgctgggaagaagcacttgaaattctggatacttggatcttctagaaagactcaactaaatggagggattagcaggacaacatcattagcgatacatgaaaagcctgccaatctttctattcttaaaggaagctcttttacatctatcacttctatgtggggctgtagtggccatgataattgtaaacaagctggcgattgctttcccatatatacactgactgattcaggcattctataccttattaattctgggatgttggtcgaaaagtctgtgaccttgaaggttcaaaaagcttttgcattatcaacatctgcaaagctaatagcttgtgcatgcaataatggaatagtccaattatttacccccatctctctagaatacatgggtagtatagtatattcaaagaccaaaaagtttcaagaagaaagcaattctgttagccatactattgtccctgaacaggattttgaacagttgcctgccctgcctgatgcagttgcctgtcagttttcagccttagaaaagattgtggtcatttatggagatcatagtctctacatctatgacatacatgatgtgaatcgggtcacaaagtgttttgtgctagtttcacattcctcatgcatatgggacatcaagaatctatgttgtgaaaacatgcatgatccatctcttgcatgcactgctagaggttgtttggggggaatttcttttgcaacttgctctgctgatggtacagttaggatatgggatattgctttgcaatctgattttttaaaagatgctgaagagttgaagactgaattattgagttcttcatgtttagtaactgctgggacatttgaacgtgatgcagttaaggcagatcttaccaatcaagagtttcgatcacttgctgttagttcagatggaaattatcttgctgctggtgattgcaaaggaaaccttcatatatacaaccttcatacatcagattacacatgtttccagggtgctcatgatgcagagattcttacattaagctttaccttgtccacccaagatatatctaaggaaattgcaaaagacaattactttcttgcctcagggggacgagattgtatgatccatctctatgatgtgaaaagaaattttgatctcattgacagcattgatgatcattcgggtgcagtgacttctatcaaaattagcagcaatggttgcaggatcctcagttgtagttctgatagtttcctggtgcttcgtgatgtggtgatagcagatagtggctataaatttttgcagcaacatcgtcaaagggctttacaacgtggaactgtctatgacatggctgtggatcggacatgtgagactgttgtcactgttgggcaggataagaagataaagacgtttgacatggctgctcagaaactaattaggtcttacaatcatgataaaaattttggagaacctataaaggttataatggatcctagctgcacttacgtggtctgctcattctctaacaagtccatatgcatgtatgactttatcactggagagatggttgcgaaggccacagggcatgctgaaattgttactggtgtcatcttcttgcctgattgcaagcatatagtttcggtggacggtaatggttgtgtttttgtatggaaattgcctgctccattgtctgctagaatattggagagaataatggaaaaaaataatccattgtctccaagaagttctgttcaacgtccggcttataattatctatcgttttgcaaagaagaatgccgacattccaagatcaatcctgaggatgtttggtcactgaggaacaacagccaaagtggggatggaatgctttatcctgaaagcagtcatagtgaggcttcatcttttaaatttagtgtttcaagacttcccaaatgggctcaagcaaaagtgaccagttccattaatgtcaacaagaatcttaattgcaattcattagaggagtatgctccttcatcccctgaagttcaaattccatccgatcatgcttctccattgcctgatactctgaactctcaagattcttcaaggtttggaggaacttatagcaacattccattggacaaccattggcactctatttatactgtttgtatggaagcactttcctccccagagatgcagaatttatgtgagacaaagtttccagagattcccttgagtctaagacaacataaggctgtgatttgtgaggaccagaactcctttgggcctaataaccttagcaagaatgaaaagaggggtgttgctccagaacatgttggctgtaacaataatgatgtttcttggtgttctgaagaagtttctgagagtaaagcagagcagttgtatttaagtgaatctggaagtgtgtcagaaacaactactgaaggcaatttgggaagtctaccatctgaagaagacagtgacatgtttaagcaacattttggtagcttatcaaatacacacaaggtaaagtcgaggaattcattagttagaaggttttctgcaagatatactgtgcaatgggattacccaggggattgcaagaaactttttagcagtcctgttgggaataaaagtggtagaaaaagctctgaggataaaggtgcaactcatactgtatcagaagacagatccttgcaggttaaggaaactgaggaagtgacaaattcttctgaacaggacatcaagaattcagaaccttgttctgcagattcaacatgtgaactaactaaatttccagtcaaagaaaattcagttgataaagggagtgaactgggagaaaccatagccgtgtgcaaggaagcattcggtagcttggatgcagcagctgagagtgtgctgcagttatttttaaaattggaaaatgttcacggcaaagaggtcgcaacgggagctggagctcaatttttagacgaggccactgagctacttcccctagttgttaataaagttaatgctgttgctagattggtgcaatgtaggaagaacagtaagtgtgaaactagtagaccaagtgtccaagaaattgaccagtttggtagatttgccgcaggcaggtatgatacaataatggaaacaccaaaggacgataccagcattcattaaatatatttcatttattttcttttccaaagtatagaatgttgctttggttaacaagtcagcattctacttcaagtggatatgttaattatcaaactggaaattatcacggtgagtagcttttgtcacttttcaaatgaaattttacatgctaacggggtttggttctagcagaagggtttc

SEQ ID NO: 310 - DNA, 1071 bp, Glycine max
atggaagcgcgtgcaggagccaatcagcgtattgcaagaatctctgctcatcttcagcctccaaatttccaggaagggagtgatgttcttcttaagagtgctgagtgcagagcaaagggtggggcacctggattcaaagttgcaattttgggggctgctgggggaattggtcaacccctttctttgctgatgaagatgaacccattggtttcagttcttcatctttatgatgttgtcaacacccctggtgtcactgctgatgttagccacatggacactggtgctgtggttcgtggctttctggggcagcaacaacttgagagtgcactcactggcatggacttggtaatcatacctgctggggtaccaaggaaacctgggatgacaagagatgatttatttaaaataaatgctggaattgtgaggaccctttgtgaaggaattgccaagagctgccccaatgcaattgtcaacttgattagtaatccagtgaattccacagttgctattgctgcagaggttttcaagaaagccggtacatatgatccaaagcgactactgggtgttacgacccttgatgttgtgagggcaaatacttttgtggcagaggtacttggagttgatccaagagaggttgatgttccagtggttggaggtcatgctggtgtcacaattttgcctcttttgtcacaggttaagcctcgcagtagcttcactgcagaagaaactgaatacctgacaaatcgcatccaaaatggtggaactgaagttgttgaggcaaaagctgggacaggttctgcaacactatcaatggcatatgcagctgccaagtttgctggtgcatgcctccgtggcttaaaaggagaagctggggtagtggagtgtgcttttgttgattctcaggttacggaacttcccttctttgcaaccaaggtacgtctaggtcgtgctggagcagaagaggtttatcaactgggtcccctgaatgagtatgaaaggattggattggaaaaggcaaagagagagttagcaggaagcatccagaagggtgtagagttcatcagaaaataa

SEQ ID NO: 311 - DNA, 1631 bp, Glycine max
aatgccagcggggaaggtacgtgtctctcactctcaaacaccgaaccccacattctaaagtaacaacaacgccggagaatgacgtcacactcccactacccacccgacctagacgccgactccgtctcctcctccccacgctccgaccacttccacgacgcgccgccccgtgtccgcttcatgtgcagcttcggcggcaagatcctcccccgcccccacgacaaccagctccgctacgtcggcggcgacacccgcatcgtcgccgtctcccgctctatcactttctccgcccttattcttaaactctccaaactctcaggcatgagcaacataactgccaagtaccagctcccgaacgaggagctggacgcgttgatctcggtcaccacggacgaggacgtggagaacatgatggacgagtacgaccgcgtcacacacaatcagaacccgcgatcggcgcggctccggctcttcctcttccccgaaggagaagactcccgcgccaacagcatcagctcgctcctaaacggctcagccaaccgcgaaaactggttcctagacgctttaaacggcggcgtttcgggcctcgaacgtggccgctccgaagcctcctccatggtctccgaagtacccgattacctcttcgggttagacaactcggaagaaattacaaatcaccaacaccaacgcgacccgcgacccaaacccgttctccaagacagcgtttccgttacggatccgggttcacccgccccggttgtctcgtccccttattgttccacgtcatcagcgccgcacgtgccttctctcccgaaccttccccatgttaaaaccaaacctttaaacttaaacccggttcctgatacacacttcaaggaaaatcaacccgaacctgaaaccgagcctcaaccgaacctctatctaaatccaaataaccctgtcattcactatcctccagaagctgcttattcggtaaatccggttccggttttctatgtttccggtccggttcgaccgggaactgttccggttcctatgcaaaccccttacccctacgttcaacaaccatatcatgctgtgatgccacctcaggttccaatcgggtaccatcatttggttccgggttcgggtcaattatatggggcgggcgtgaggcacgtgaccccactgcaaccttacagcccctccgccgcggtggttcatgatggtttgaagcagcatgggtatcatcccgtgccgaataccggttcggttccggttcacccggttacaccgatgacgggttcggttgaaccgcagagaggtggagcggagtttgtggcgggtcggggccccagctcgttaaataactgaacccgttttgcttagggaatggatgctgaattattcctatgatcatgcaaatgggtaattcatgtctatagtacgtgcctgtatgcaaatgggaaatgggaaatttgaatgcattacaagccaaaaatggtaattacataaaattgtttgagaaaatcatttcaagttgtatattaaaaaggaaaaatgttaataaattatatttcattatgctaccaataatttattgtttttttattattctcggatatatcaataacaatttgcaggtttttatt

SEQ ID NO: 312 - DNA, 486 bp, Glycine max
atgtctctaatcccaaacttcttcggtggccggagaaacaatgtgttcgatcctttctcactggacgtgtgggatcccttcaaggattttcctttcccaaatacgctttcttcagcttccttccctgaattttctcgggaaaattcagcatttgtgagcacccgtgtggactggaaggagaccccagaggcgcacgtgttcaaggcagatattccaggactgaagaaggaggaagtgaaggtgcagattgaagacgataaggttcttcatataagcggagagaggaacgttgagaaggaagataagaacgacacgtggcatcgagtggagcgtagcagtggcaagttcatgagaaggttcagattgccggagaacgctaaagtggagcaagtgaaggcttctatggaaaatggggttcttactgtcactgtccccaaggaagaggttaagaagcctgatgttaaggccatagaaatctctggttaa

SEQ ID NO: 313 - DNA, 1056 bp, Glycine max
gtttttatagaatcatttgaaactggtaaaaccaaccaaattgcaaacacgatttttctggaacgtacacgattatcctttcacttactttaaatacatcacgattagtcagaaaaacgaaacgaagaaaagagttacaaagttacctgtatacgatctcattttgatctcccaagtttcaaatctcgcgaataaatatatcaaaagatgtctctgattccaagtattttcggtggcagaaggagcaacgtgttcgatcctttctccctcgacgtgtgggatcccttcaaggattttcattttcccacttctctttctgctgaaaattctgcatttgtgaacactcgtgtggattggaaagaaaccccagaagcacacgtgttcgaggctgatattccagggctgaagaaggaggaagtgaaggtgcagattgaagatgatagggttcttcagataagcggagagaggaaccttgagaaggaagacaagaacgacacgtggcatcgcgtggagcgtagcagcggcaacttcatgaggaggttcaggttgccggagaatgctaaagtggagcaagtgaaggcttctatggaaaatggtgttctcacagttaccgttcccaaagaagaggttaagaagcctgatgttaaggccattgaaatctctggttaaacttgttgttgctgaaaatcgtgagctttgctttgtgtaataactaataagtattctctgtcatgtgttcctgtggtgaattttgagaattgaaagattttacattgtgaaatgtaactgcttaagtggtaattgtgtgcttgtgtaattcatgtgaataaagtccagccttcagaaaatactataattttgctatatcacaagtgtctgatatgtgatgtagacaaaaaaatagatcgtgtaatgtgaattgtaattggcctatagtgtgcatttgttatagccgagagactttctctctatgttcataaactccacctcccagtaagtgtataatattccatcttaataatgaaaataaatagacgatttagtgtgttcccatgc

SEQ ID NO: 314 - DNA, 1299 bp, Glycine max
aaccattcagttgaagacattgctagtgagcacttactattctgtgagcaatggctttaacactagacaaaaaatctgttggtacctttttcatgcttttcttgacatgcatatgtcgtgcctcgtcacgcactctctctgagtcttccattgccacacagcatgaagagtggatggccatgcacgaccgtgtttacgctgacagtgcagagaaggacaggcgccagcagatattcaaggagaatttggagttcatagagaaacacaacaacgaaggaaaaaagaggtacaatttaagcctaaacagttttgctgatttgactaacgaagaattcgttgcttctcacacgggagctctctataagccaccaactcaactagggtcgttcaagattaaccacagtcttggcttccataagatgagtgtcggtgacattgaggcaagcttggattggagaaagagaggagctgttaatgatattaagaaccaaggcagatgtgggagttgctgggcattttcagctgtggcagctgttgagggaatcaaccaaataaaaaatggccagttggtttcattgtctgagcaaaatttggtggattgtgccagcaatgacgggtgccatggacaatacgtggaaaaagccttcgactatattcgtgactatggtcttgcaaatgaagaagaatacccttacgtggaaacagttggaacttgtagtggcaattccaaccctgcaattcagatcagaggttaccaaagtgtaactccccagaacgaggagcaacttctaactgcagtggcctctcaacctgtctcggtgctccttgaagccaagggacaagggtttcagttttactcaggaggagttttcagtggcgagtgtggaactgaacttaaccatgcagttaccattgttgggtatggtgaggaggctgagggaaaatactggctcataaggaattcatggggcaaaagttggggtgagggtggttacatgaagcttatgagggacactggtaaccctcaaggtctttgcggcattaacatgcaagcctcttatccgtttctttaaatatgtgttagagcacattaccctaaaataaaaaaatattattaagttaattaatccaccagtaatccttatgtaatgctgcaatgtacgtagcatctatgagatcatgatcttagatcagatcatatgtttaccacattatattcgttaagagaaaaatttattgactaccacttgtaattttctatacatcttttataattttactgtttgatcagtctattcg

SEQ ID NO: 315 - DNA, 1281 bp, Glycine max
atgacgtcactctgccggcgcatccccatcgccggaaccggccaactctgcctccgttgcgctccgaggaccgctgcgattggcgcggtccgctacggctacttgcctaagtggccgacaatcgcgctgcgactgcctccgccggctaaatgcggcggcgcgtgggagagatcaggcgagaagaaggtggtggcgcctcgcccgcgctcggtggggagattcgcggcggagagtggccgggaaagcgggaatcggttggcggaggtgatgctcgccgccgctgtgacggtggtgatgggcgccggaaacagagtactgtacaagctcgcgttggttccgctgaggaactatccgttcttccttgctcagcttgcgactttcggatacgtaattgtatacttctctattctgtatatacggtatcgtgcgggcattgtcactgatgagatgttatcagtgccaaaaactccatttctagttgttggtctcttggaggctctgggtgctgccacaggaatggctgcaggagcaatgctatccggagcatcaattccaattttgtctcaggcttttctggtgtggcaaattctcctctcatatttttttcttgggaggcgatataaagtcaaccaactagttggatgctctcttgtggcaattggtgtaattcttactgtagtaagtggatctggtgctgggcattcattgaaggaagctggtatattttggagtcttttaatgatagtttcatttttattccaagcagctgatactgttctgaaggaagtaatctttttggacgcaactcaaaaactgaagggaggttctttggatatgtttgttgtcaattccttcggatctgcattccaggcactattcatttgccttctcctccccttcttatcaaaattatggggcatcccctttggacaactaccaaactatcttaaagatggtgctgcctgctttctgaatgttggtactctgtcaagagcatgtgatggagctcccctgctgcccttgttgtttgttattgtcaacatgggcttcaatatctcattgcttcatcttctcaagatctcttcggccgttgtctcatgtctagcctccacattttcagtcccaatagcaatctatgtgttcacgctgccattgccatacctcggtgttgcctcttctcttccaacaggctttgttgcaggtgccatcattctcatcataggattactcatatatgcatggaccccttcaaatggttcctccactgcatccatcacctag

SEQ ID NO: 316 - DNA, 1868 bp, Glycine max
gatatttaccgtattggagtattttgttctattttattccacctttcattttaagaatcctacagcacaccaccaccaaccttggttttacaaaaccaaacagctaaccgcgttgcgtcacgcacacaacgtttccgttttatactgcttctctctgtttcgcttttcaccttcgcaccaacgtgactaatgtgactcacacagtcccctccactcccgttctctctactctttctttctctacacttccaattctcaaattgcgtcacgcaaccatgacgtcactctgccggcgcatccccatcgccggaaccggccaactctgcctccgttgcgctccgaggaccgctgcgattggcgcggtccgctacggctacttgcctaagtggccgacaatcgcgctgcgactgcctccgccggctaaatgcggcggcgcgtgggagagatcaggcgagaagaaggtggtggcgcctcgcccgcgctcggtggggagattcgcggcggagagtggccgggaaagcgggaatcggttggcggaggtgatgctcgccgccgctgtgacggtggtgatgggcgccggaaacagagtactgtacaagctcgcgttggttccgctgaggaactatccgttcttccttgctcagcttgcgactttcggatacgtaattgtatacttctctattctgtatatacggtatcgtgcgggcattgtcactgatgagatgttatcagtgccaaaaactccatttctagttgttggtctcttggaggctctgggtgctgccacaggaatggctgcaggagcaatgctatccggagcatcaattccaattttgtctcaggcttttctggtgtggcaaattctcctctcatatttttttcttgggaggcgatataaagtcaaccaactagttggatgctctcttgtggcaattggtgtaattcttactgtagtaagtggatctggtgctgggcattcattgaaggaagctggtatattttggagtcttttaatgatagtttcatttttattccaagcagctgatactgttctgaaggaagtaatctttttggacgcaactcaaaaactgaagggaggttctttggatatgtttgttgtcaattccttcggatctgcattccaggcactattcatttgccttctcctccccttcttatcaaaattatggggcatcccctttggacaactaccaaactatcttaaagatggtgctgcctgctttctgaatgttggtactctgtcaagagcatgtgatggagctcccctgctgcccttgttgtttgttattgtcaacatgggcttcaatatctcattgcttcatcttctcaagatctcttcggccgttgtctcatgtctagcctccacattttcagtcccaatagcaatctatgtgttcacgctgccattgccatacctcggtgttgcctcttctcttccaacaggctttgttgcaggtgccatcattctcatcataggattactcatatatgcatggaccccttcaaatggttcctccactgcatccatcacctagagaagcttggagcatttgaatctcaatatctgcaccattgtaagtccaaaaggataggttgcaccaaccctcattacagcaaatggtacaaccaatgaataactcaggtccactctttcgtgattgatgatgatcacaagatggagaaatgaaaatgatatgtactctttcttttaataaagtgctagtccaatgagaaaaagaaacggaaagtgaaattctcctaggcttgctcgagtaaatatgaaagcatataggtcttttttgatcgatcgtatatggataggtctagttcaaattttgtgtaaataa

SEQ ID NO: 317 - DNA, 1506 bp, Glycine max
atggaggagaagagagagaaagagggaaactcaaagtcatcatccaccatggcaaattctgtggcattttccgacgagattccgaacatgagcatgagcacaagcttccctttctcccctgctttctctagcatctttgacatgatgccacctccaccaccttcctcatctcacgatcctaaagctcccaacaactttgctggcttcatggacttgctcgctgtccctgctgattattatgccccttctttattcgactggccccaaaacaccaccgccacgtcagcaccaccacctctcaccgcccaaatcaaccaccctcttccgtctccggccagctccaatgtccccgacggctccgaggttctcaacactccggcatctcccaactattcgtctatttcgtcgtcgtcgaacgaagccgccgccgccgccgccgccaacaaagcaacgggaaatgataatgatgtcgatgatgaaacaacaatagatgcagctgcaggcagaggagaagaagatcaagaccaagacaagactaagaaacagctcaagccaaaaaagaagaaccaaaagaagcaaagagagccaagatttgcgttcatgacaaagagtgaagtggatcacctcgacgatggctacagatggcgcaagtacggtcaaaaagccgtcaaaaacagccctcatccaaggagctattatcgttgcaccaccgcgacatgcggcgtgaagaagcgcgtggagcgttcctcggaggatcctacggtggtggtgacaacctacgaggggcaacacacgcacccgtgccctgccacgtcacgggctagcctcgggttcatgcattccgaagcaagtggtgggttcggacccactagtggattaggttcggcacactttatgctgccacaacaacaacagtttcgggaccaagcacaagcagcaatgttgttgtacaactccaactcatcgtcattgtcattgccactgaatgttgttaactcagcttcttgtgttaataatagctaccccaatacgtcgtcgttgagtggcttccttcaaggccaagagaatcatcagcgaagtgtgttggctcctcacgctttcttgagggacaatgggcttcttcaggacattgtgccaacgcatatgaggaatgaggagagtgaagatcgtgtttagatacttatggcagagacttaatgtgggaaagggaaagtcaagaatgtaagttaataagcaatggagctgggaactctatctataatgagggaaatttaagaaagaaagatgaaaactatgcatcagagagtgttatgattgccccatgacttgacacaatgcatgaggaaatagctacagcatggattgtttcttgatgatagcaaaagatggatgatgtgagatattggtgtggagaaaagcattatatatatatggttctcatgccctagcatagcatacatgttttgttttgtaatactagcagaagccataggccatgccactatc

SEQ ID NO: 318 - DNA, 1830 bp, Glycine max
cgactcgcgaggttcacgctttgctcggtactataaaggaaagcatggggtctcttgtcatcttcataagaggaaagagtagaaacgtgaaccagaaccagaatggatcttcaacaacgaccactgaaacttcactttattccttacctgtcaccggggcatgtgatccctctctgcggcattgcaacactcttcgcctcacgcgggcagcacgtgacggtgatcaccactccctactacgcccaaatcctccgcaagtcaagcccctccctccaactccacgtcgttgactttcccgccaaagatgtgggccttcccgacggcgtcgaaatcaagtccgctgtcaccgacctcgctgacactgcaaagttctaccaagccgccatgctcctccgcagacccatctcccatttcatggaccagcacccacctgattgcatcgtcgccgacaccatgtattcctgggcggatgacgtggccaacaacctccgcatcccacgacttgccttcaacggataccccctcttctccggcgccgccatgaagtgcgtcatatcacaccccgaactccattccgacacgggccctttcgtcatccccgattttcctcaccgcgtcaccatgccctccagaccacccaagatggccaccgccttcatggatcatctcctcaaaatagagctcaagagccacggcctcatcgtgaacagcttcgccgagctggacggagaagagtgcatccagcactacgagaaaagcacgggtcacaaggcttggcatcttgggccagcttgtctggttggaaaaagggatcaagagaggggcgagaagagcgtggtgagccagaacgagtgtctcacttggctcgaccccaagccaactaactcggttgtctacgtatccttcggaagcgtctgtcattttccagataaacagctttacgagattgcatgtgcgttggaacagagtgggaagtcattcatatggattgttccagagaagaaagggaaggaatacgagaatgagagcgaggaggagaaggaaaaatggcttccaaaagggtttgaggagagaaacagggagaaggggatgattgttaaagggtgggccccgcagctcctcatcctggcccacccggctgtgggtggcttcctctcgcattgcggctggaactcctccttggaggccgtcaccgccggggttcccatgatcacgtggccggtcatggcggatcagttttacaacgagaaactcataactgaggtgcgggggattggggtggaggtgggtgccaccgagtggagactcgttggttatggggagagggagaagctggtcaccagagataccattgagactgccatcaaaaggttgatgggcggtggcgatgaagctcaaaacatcagacgccgctcggaagagcttgcggaaaaggctaaacaatcccttcaggaaggaggttcatcccacaacaggttaacgaccctcattgctgatctcatgcgcttgagggactctaagtcggccacctgatttcttgcgccatgcccctacaattataactcttccctagttataagaatatctattatgaattagtaaataaacagatttacttactaacttagtaagttcattttagtgcgttaagttgttgtaaactttttgttgagttgagaataaaggtgagtgaatttgatttgttcctatgaacctttgaaacatgtcccttattttatctatttattttctgtagttccccaaaatcgacttttgctaataatacactctcatcacatgttttgagaggctacattcaaataagccaaa

SEQ ID NO: 319 - DNA, 345 bp, Glycine max
atgaaacagaagtgtcttgttgttctggtctttgttgttctcttggcttgtgcggttggttgggatgagggtatacccggcggatggaaccccatcaagaacattaacgatcctcacgtgacggagatcgcgaatttcgccgtgacggaatacgataagcaatccggtgagaagctaaagttggtgaaggttatcaaaggcgaccttcaggtagtagcaggcctcaactaccgcctcagcctcaccgccagcgactccaacaattaccaagcaattgtctatgagaaggcgtgggcccgggagcattacagaaaccttacctcctttacccctcttcatgcttaa

SEQ ID NO: 320 - DNA, 402 bp, Glycine max
atgagaaggaaaatccataaccccactgtgttccgctcttccattgttttgctacaagagagatttagacagttgcatagagtgaaagaaatgaggaagaagaaagaactgctgaaaatgctcactactagtgaacctaaacctttcaattctaaccccactatgaggcagtttttccaccctgagttgatcatcccatctaggtcatctcctcctcatgtttctctttctctagggcctacttcacagcccatgcaagagtacaccaaaagcactattgatgccccagtcgcaaacaacatgctctccatagattctacacacaaccaggtttcatgcaagaacatctatgattgggattcgggcactgactctattgttgatacttcccttcacctgtaa

SEQ ID NO: 321 - DNA, 2263 bp, Glycine max
agccgtgtgattgtgaaaggttaaaaccaacaataaaattgacgagatatatttttattatttttgagtttgagtcaaaacctttttaataagatatgaaaaatcaactcagtctcgattttttacataatacttttttaatttttaaaattttaatgattcgagggttttgtggggtttggcggttagggtttagtttcagtatttaaaaagtgagaaaagaaaggtatgtggccatatgttagtaattcgttggaagtaacgctagcttcagaagtcgatggtttgctttcttcgcaccgtgtccgcccgcctcttctcctcctcggtttgccactgaatgcagctgatatagtttacagaagttgtgaaggaccaacagagcacttaagagagtttaactgagagctgcagggatggctcatttggatgtttgtcatcaagtcaggttcattggtcagcttgaggaatatggaagtagactttcttccagtattcctacggtagaaggatcaaaagataaagaagaaatcgttgaagttaaacctatcttcatgccaaattttaagaaaagaaaacgccttagccttaatcgtcttagagagatcaaagcagatatgtgtgcaaggcaaagtagtggcacacctaaaacaaagtgtgaaagcatagacagatggtcagctaagaggtatgagttggctcagcaaagcatgtgggaggtcttaaagggcgaaggtgcaacttttgaaaatccaattacccgacctgcactaagaatggctgcccgtaaacacattggtgatactggactgttagaccacttactgaagcacattgatggtaaagtggcacctggaggaactgagcggttccgtcgatgtttcaacaccaagggaatcatggagtattggttggagagtgctaatttggatgagattcgccaggagactggggtgcaagacccttatattggtgaactgaaaatgcttaaaattgaaatggcccagatgaagaaagacatgcaagagctcattgccaagaagcaagaaaaaagtgaaatgtgcttgatggaggagacacagaaaagttttgtgaattggaaagctatgactgagcagcgtgtaactgagattatgacttctttgaagggtgtgcagggcatgcatgaaaacatgttgatttggaaaactaaagttgagcaacagctaatagaaataaccaataaattgagtgatgtgcaaaaattgagagaagacaccacttcaagttatcctccagtaagttgggaggattggctaggaagcaccaacacagacaatattcagggaaatgaactcaacctggagctgcttaatgttccaaaagaggttgtacttcaagatctgaactcaaccctaccaactcagctgcaatgtgtagaactgactaacatgaatagcaatttgctggagttggtgccaaagataaaggaagatcaacctaatgtgacccctgattcttctatgactgttaattcaaagtcagaccttgacaattcattgatattgtatcaggtggtgtcaatagtattacatgtgtgtgtataatattttctcaatttttatatttttcagtttaataatcatcgtataatatttttcttacaggaaatgatcatggaattatttacatcgagggataaaatggagcagcagttattgcagatagcaaatactgtatatggcatgctgacaatgaaatagactctacatcgaatcgaagtatcaatcctaacttaaggattctaatttattaccattttcttttgctactctcatagagtgtagagtttagatattgtacagtgttaacaatcttatggggaagtgaaatccttttccaaccacaaatagaatgtcacccacagtgagcttcaaattgttgatattcttccctggccttttacaatacaattggttttaaggtaggtcactaggtcaatggtagggctgttattcagtgacaatttttctagttttgttaagtaaaaaattaagctccttttggtagctcttctggtagttttttattaaacattttagctcgagtaagtcatgaaaatgtgcttaaaccttatttgggggataagttgctatctgtaaaatttctacagtacatctgatctttcgggtgttattaacaattaacttatgctttattttgatgacacaatgtagctgatggtacgtacttaatccctcgacgcagtttttaacatttgttt

SEQ ID NO: 322 - DNA, 2983 bp, Glycine max
tcgtattaaaattggttgtagcgtacgctcactatgaacacgcacttcttcatcctcattgctctcactctctcttcgccgtttcttgtcggccttcgctgttcgttctctcgccgaatttcaaaaccctagaaacgtttctctaaccccaaatcaaataaaatcaaatcgaatccaatcgacgcgctagatgtttcagttccgaccatgtggttcaatgcaaacagtatgagtgcttccatggtgtgttttggaaggagtcagatcttgttaggttaatttgtacttgcaactgacaaactcagcctcagcttaactttttatatcttatagatggatcgtcgtgatacttcaggatttgtcagtggggggtgcattaaacacctgtagacacatctaaccctaactttgtagataagcatctctttttttacccggaagtcaggaaggttgtactgtgaaattcataaataggattagatattgtttcgggagtggtttcatcactttcatggacgcgaggttcaagaactttttaggatttgctgctaatcattctgcaaatgcattcaagattttgggcaattctatgcaagttgaaggaaggggagctaattatcatgggacagataccatcttacgacttgattcccctggttcttcaattcccacctctgtgccctcttataagggaacaaaaaggaagtgggatttaattgatggatgtatgggtcaaagagttgactcttctttgtcacttgggcttgggcgttcaagcagttcctcagacagcaaggggagttcagctgctgcctgcactgctatgtcttcagccaaagatattgatgaggaatcatctttagatattgaactggacttttctcttcatcttggctgtgagaaggtacacagccagaagaaacctgttaatccaagtttgaagacaatggagctgcaaccaaaatttgatttggagttaagcctttccactgggccctgtgagtcggatattacaagtgtacatctaaatccatcacctcttcaattgaatatggagatgccattagcattcagtgggacacaaaatacagatgagggatcaacttcatgtagttggaagccagggattgctttgccatcttctaagacatcatcaaatacaggcactaattttcttttaaatcagtcttcaaagcagtttgatcatagtcctattgttgtggaactctcgtctaccagaccaaaaagtttggtcacctgcatttctgagcttacacagcagcaacaggcactacatcgccccagtaattctaaaacatgtcaagtagagggatgtgggaagggtgccagaggtgcttctggacgttgtatatctcatggtgggggtaggaggtgtcagaaacctggctgccacaaaggagctgagggccgtacagtgtactgcaaggcacatggaggtggcaggcgatgtgaattccttggttgcacaaagagtgcagaaggacgtacagatttctgtattgcccatggtggtggccggagatgcaatcatgaaggttgtacccgggctgccagagggaaatctggattgtgcatccggcatggtgggggcaagagatgccagagagaaaattgcaccaagagtgcagaaggcctatcaggcctttgtatctcacatggtggagggcgtcgatgccaagctcctggatgtacaaaaggggcacaggggagcacaatgttttgcaaagcacatggtgggggtaaacggtgtactgcaccagggtgcaccaaaggtgctgaggggagcaccccatattgcaagggccatggagggggaaaacgctgtacataccagggtggtggagtatgcactaaaagtgtgcatggaggtaccaacttctgtgtggcacatgggggtggaaagaggtgtgctgtaccaggctgcacaaagagtgccagaggaaggactgatcattgtgtccgccatgggggaggcaagagatgcaagtttgaaggctgtggaaagagtgcacaaggcagcactgacttttgcaaagcacatgggggaggcaagagatgctcttggggccatccgggttcagaatatggcatccaacaggatggtccttgcaattcatttgcaagggggaaaacaggtctatgtgcacttcatagtgggctagtgcatgacaagagggttcatggaggcatctcactgggatctgttgttcaggatcctcattccagtaaaacagatgaactaaagcaggtactcgttgacaaaaacatgggtatagatatgatgaaaatagggagtagtctaggcactgcaacctgttccgacttcgaacagtttgaagctgcaactgctcatgtctcagccaaggaaggtagtcacttgccagtgtcagttgctgttcctgaaggcagggtgcatggtggtagcctgatggcaatgctaacggggagttctagccgtggctcaagcagcggcagaggtctagttggcgatccatctgaaccaatcaaaggttacgccatgccccagagttggatttaatgctagttatcgttttcattgtcatggtctccgtagttaacaagttttatcagcatgttacattattactccattctactttaggttgttgacgaattgagttattctgtcatccgttgaaattgtgttgagagaataaccaaatcgtttgacaatctggtggaggggagatatcaatttggaaaggaaaattgtactttgattaggttgttggtgatgttcttttaccattcttcctccttctgtaaatattacatctgatgaaacgtttagcagtttgtgaatacaggttgctacctgtaatgtaaggtctgtcagtgtgccatgtattctatttaataataaaacttcactgagattgtatttgttataatagtacttattttgaattcaatacatggttaccctctcgagtttgactcc

SEQ ID NO: 323 - DNA, 3036 bp, Glycine max
cacctttggctaatttgtttggatggagagataaatcagtgggtctttccatcgtgcaagtaactttgtgttgattgttttctaaattcaggttatcttcttctgtttgcacttgcagccagcttacgatgaccgaataacatacacgagaataggtgtctatatatactgcttcaagaaatgaaagattacacctggaggagagttcgtggagtagaaagcacaattttaggaggaagggtgggtataaaatttattttgcaaactaaatttgtacattgtagacattaatgcctaaaaaacatataggggttacgagaagatttccaggagagtataaaaaaaaggagatataaacatatgtgtcttgaatcgaattagctttcattcccttccaaaagagaaaatgagattaagcatgaaaagtgctttactatcaacactcccaccctcttcatcagttctcttattctcctcctactctaaattcaaactcaaatccccactcggaattcccattcgcgctctcacctcctcttctctcccaaccacccgcgaccacgatgatttattcgaccctctttcccttcccgctccccaacaccttcacaaagccaccaacgccatcgagagaatcgccctccgcttgcgcaacttagggttagcttccaccaccgaccttgccgacgccgaagacgatttcctgcgccgcgaatggcttcgccccgaccaggcgctttttccgtgggacaagggacaagaagaagacgcagaggagcccggggaacagcaaaaggagatgctaaagaagaagaacgttaatgcgtcgacattggcggagcaaacgctggtggaggaggagctgcggcgattgcgaacccttggaatgagtcttaaggaaaagatcactattcccaaagctggcctcacgcgagccgtgctcgacaggattcaccgtcactggagcaactgcgagctggtgaggctcaagtttcacgagtttcttgctcagaacatgaagttggctcatcaaattgtcgagcatagaactagagggttagttatatggaggtcggggagttatatgtgggtttaccgtggtaagaattatcaagggccggtggagagtgatgcaacatcaatggaaaagagtgaggcagtttggtggaagggggagaacatgacgccagaggaagcagaattcaacaggatgctggatggctttggtcctcgatttgttgaatggtggggtactggaatacttcccgttgatgctgattcacttccccctatggttcctggttacaaaacgcctcttaggcttcttcctgccggaatgcgtccgcaactgaccaatgatgaactcacgaatatgcggaagcttgctaaatctcttccttgtcactttgccttggggagaaatagaaatcttcaaggtctggcatctgctattcttaggctttgggagaaaagtttagttgcaaagattggtgtcaagcgtggtattgtgaatacaaacaatgaactgatggctcaggaactgaaggcattaacaggaggtaccttactgctaaggaataaatattacattgtaatatatcgtgggaaggactttgttccaaccagtgtggctgctgttattgctgaaagacaggaattgacaaaacaggtgcaggatgttgaggagaaggtgcggtgcaaagctctcgactcaactccatccggggaagatgaatcaacagcacaagcaggatcgttggcagagttctacgtggcacaggcatgctggggaagggatatatctactgaagaacgtgagaggatgatgcaagaggttgccaaagccaaaaatgctaagcttgtcaaaaaaattgaatgtaaactagctgttgcccaggccaaaaggcttagagcagaaaagctattagcaaaaatagaagcatctttgcttccagttggtcctgattatgacaaggaaacaatcacagatgaagaacgtgttatgttccgttcagttggtttaagaatgaaggcatacttgccacttggtatacgtggtgtttttgatggtgttattgagaatatgcatttgcattggaaacatcgagaacttgttaaattaataacaaaacaaaagacccttgcttttgttgaagacacagctaggttattggaatatgaaagtggtggaatactagtagcaatagataaagttcctaaaggattttctcttatttactaccgtggaaagaattataggcgacctatgacattgaggcctagaaaccttctaacgaaggcaaaggcattgcagcgttcagtagtcatgcaacggcacgaggctctgagtcagcatgtaactgaattgggggaaaaaatagaagaaatgaaaaaaaaacttggtttgtctcaggatttggggactaaagataggtggaacgtagaggaccacaaccaaatagaccatatatcagagttcacccaaagtgaggaggaatactctgatggagatgacactgacggttgacgttttgcaatgaagttcctgaatcagaatggcttctgccattgcctgcagccagctagatgaggcatttttttcttttatgaagccaacaacatatttgttgttccctacacctaaggttgtcaagaggcaggtgtgtagacagcaggttgaatggatcttctgtttgcacgtaagagttgaaaattttatggagtcctgttcgatcaaagttctggaatttgagtatgcctacaaaatccctctccaattctatgccagtcgaacttccactgctctgagatatggataagcaatatgctttcttatatcatagtatttgttattctgacacaatgcttttcgatgctctttcatttttctttttaatggcttggtgttggtataccccctacaataaaatgcaacttggggtgcaaattagcttatatatttgtaaattattcggttcagcttgtttaactaaataaataaagttaaacttttttttaaggataaagtaaacttat

SEQ ID NO: 324 - DNA, 1782 bp, Glycine max
aaagaagagaagaagaagagatatctgaaaaagggggttctggtggattgaattgcattagcaatgggcgtgtcttcaaattcaaaggaatcgatggaactatgcatatttgatttgaggagaggccaacacgaaggccaagagctcgataagatcctcttcttcttccccgccggtttgcccttctcaaagcaactctccgtcattggcctcagcgaaggactcatcactttcactagaatcttctctccagactctgcttgcgaggtcatcgaagctgaaaggcattctcatgttttctacgaggccgaacccgatatctggatagtcattagcaatgctggagaaagaacccggtggaggactgacaagacggcatttgtatacctttatcatggattatctgagggcatgtaaaaagcggtctccctgggatacttgctgctgtgattttctcgtggggaaaaagttcattttaccatcattccgtgattgcttaaaggaacgtggaactgtgcagatgctgacgataggtcgtgaggctgcaattgaggttcagtcccttgtcagggtgcttgaatcttcagctggaaacactccctggtactctttgattttatttcaagacctgctagtgtccacaactctatctcctgatgacaccttaaatttattcacatatgctgtgctaaggttgactccccatgctctatcttctggaacaagttcctggtcctacttactgaaaggaagtgctgcatccaatgttgtcactgagtctaacatggcccatccaagcactatgtctgaaagtttttatggctcatctgatatatcctctggtgaagataaccactatcatgttgtgaggcccttacagagtgacaaatggtctaaaggaaaagatggttatcttgtcactgatttatggggtgcagaagttggtacgtgggtgtttgccactcctacagtttggcttcaacagacagaagagaaaatgtatctctgtgtttatcagcatagaagccttactttgatgcttctgattcctgtatcatccattcctaatggggagcaaggtgtgtcggcagtgaggcagcaagttattgaaaatgcatcacttaaaatattgaaagttgaagagaaactatcgaaaggatggggtggagagaatgcatatcatgttagtgggtaccgctacttattagtagatggtgatagaaatgtatccagggcttctccagaaacaaaagttacaactttaacaaaggagtccttacttgctatgaataagcttaggcaagaggtggagtcggagaagagtagagcaaaactggatagccgtaattgtgaaaaagatttagagatgtgcattagagcaaaaaataatgcatgggttatttctcgagtcacaagagggaaggagctttacatggttctagagaaagccaatgaaacccttctatatgcttcagatgctgctgagaagtttagcgacaggtattgcaacggaacattttctctgtactaaagaaaaccaagcatgtgtgaccgaggaatagcacgctaggtcttctaactgctttccccaataaagtcgggaagtttttcactgttgatttttctcaccagtaaattgaagaaaggaagaaagaatgctactctgcgtatctctctctgtatattaagtgtaatttatttatacttgttcaagggtgctgtatcaaaccttgtcaccggtaactttttttttaatccgaaatttgttcaattccgagagaa

SEQ ID NO: 325 - DNA, 1360 bp, Glycine max
gacgaaaatgagctgtttttaaaatagtatcatattgtaaatataaaaatgatttatgtgggggaggagtgatccagaggaagaatctgacatgaccgaggcaggctgtttctggtttcaacttgttatgatggtgtcatcttctccattctcattctcattctctgtcgctcacggctagcaatcatgtcttctcgcttagatgagtgcttgttggaggtggatgggtacggtgatggcgatggaaaggcgaaacccaaattcctgataaggaatctcagcagagtttcggaggatggggttcccatcctcaaaggcataaatcttgagatcccagagggtgtgatcgtgggagtgataggccccagtggtagcggcaagtcaacgttcttgagggcccttaaccgcctctgggagccaccctccgcctccgtcttcctcgacgcccaagacatctgccatctcgatgtcctctctctccgccgtaacgttgccatgctctttcagctcccggccctctttgaaggcagcgttgcggacaatgtgaggtacggaccacaactcagagggaaaaagctaagcgatgatgaggtgcgcaagttgcttctaatggccgacctggatgcttctttcatggataagtccggggctgaactctctgtcggtcaagctcaaagagttgcacttgctaggactttagctaattcaccccaggtaacttaattataacataacatccatctcttttaacattttctgtttattcatttgtatgttttttaatttaaaggttttgttgctggatgagccaactagtgccttagatccaatatcgacagaaaacatagaggatgccctggtgaagctgaacaagaatcagggcatgacagtcatcatggtctctcatagcatcaagcaaatccaaaggatcgctcacatagtgtgcctgcttgttgatggtgaaattgttgaagttctcaaccctcataatctctctcaggccaaccatcccatggctaagaggtttcttcaactcagttcttaaagccaagataaatctacttgcacctgctcgtttatcggccacatatatatgttcacctctcctcgattcatatctttcaatcaattatcttccacatatgttgctttaatttcaagacgtgcaggttgatgacatatatatgattttatgatagtggaggtttagttaccaatatgatattgcaaaatgctactatagaataggaatttcgtttttcaccaaaacaaaactattgtccacagttttttctatttgcaatacaaccaattggatgtaagcgtactctttggtacaagtttcgtgaagaaagttctc

SEQ ID NO: 326 - DNA, 2983 bp, Glycine max
atggataaaacgacgaggaagctgatagacggcgttttgaagaacaccaacaaccctaaactggcatggcatcttgtcaaacgcgtcatctcttccccttcctcttcatcttcctcttccactcaacacctagtcaccatcacaacccgcatcctcgccaccgccaaaatgcacaacgaactccaccacctccacaatctcctcctatcctctcacaactaccacattgcacacccttccctcatttccatggtccgagtcctcgcccaattgggccacgtcgacgacgccattacacacttcaagtccctcagagcccaattcccatctctttctccttctcttcccctctacaacctcctcctccgctccaccctccggcaccaccgtcccggtttcgtctcgtggctatactccgacatgctcgccgcacgtgtcgcccctcagacctacaccttcaacctcctcatccattctctctgcgagtcgcgcgctttcgatcatgcactccaactgttcgaaaaaatgccccaaaaaggatgctgccccaatgagttcactctcgggatcctcgttcgcggcttgtgccgcgctggcctcgttaaacaagccttggagctcgttaacaataacaattcgtgtcgtattgctaacagggttgtgtacaacactcttgtttccaggttttgtagagaggagatgaataatgaggctgagagacttgttgagaggatgaacgagctgggtgtgttgcctgatgttgttacgtttaattcgaggatttcggcgctgtgtagagctgggaaggttatggaagcgtctaggatttttagagatatgcagatggatgcagaattgggacttcctaggcccaatgttgtaacttttaatttgatgcttaaggggttctgcaagcatgggatgatgggggatgcaaggggtttggttgagaccatgaagaaagttgggaattttgactctttggaatgttataatatatggctgatgggtttgcttaggaatggagagttgttggaggctcggttggttcttgatgaaatggtggcgaaaggcattgagccgaatgcttacacgtataacattatgatggatgggctgtgcaggaaccatatgttgtcggatgcaagaggattgatggatctgatgatgaggaatggggtttacccggatacagttgcttatagtactctcctgcatggatactgcagcagagggaaggtttttgaagctaaaagtgttcttcatgaaatgataaggaatggttgtcagcctaatacttacacctgcaacacattgctgcatagcttgtggaaagaggggaggaccctagaggcagaggaaatgttgcaaaagatgaatgaaaaatgctatcagccggatactgtgacctgcaatattgtggtcaatggtctctgtagaaatggagaattggacaaagcaagtgaaattgtaagtgagatgtggactaatggaccaacttcccttgataaaggaaactcatttgccagtctaattaattcaatccacaatgtatcaaactgcttgcctgatggaatcacatacacaactttaattaatggactttgcaaggttgggagactagaagaagccaagaaaaagtttatcgagatgttggcaaaaaacttgcgccctgattctgtgacctatgatacgttcatatggagtttttgtaaacaagggaagatatcatcagccttccgcgtcttgaaggatatggagagaaatggttgtagtaagactcttcaaacttataatgcattgatcctgggtttaggaagtaataaccaaatatttgaaatatatggattgaaggatgagatgaaagaaaaagggataagtccagatatttgcacttataacaatattatcacttgcctctgtgaaggaggaaaggcaaaggatgccatttctcttttacatgaaatgttggataaaggtatatctcccaatgtatcctccttcaaaatattgattaaagctttcagcaagtctagtgattttaaagtagcttgtgaactatttgaggttgctttgaatatatgtggccgcaaagaagcgttgtacagtttgatgttcaatgaattacttgctgggggacaactctctgaagcgaaggagctatttgaagtttcattagatagatatcttacattgaagaatttcatgtataaagatttgattgcaagactttgccaggatgaaaggttggcagatgctaatagccttctttataaattgattgataagggatatggcttcgatcatgcatcattcatgccagtgattgatggcttaagtaaaagaggaaacaagcggcaagcagatgaactagcaaaaagaatgatggaattggaattggaagacagacctgttgataggacttattcaaacagaaagagagtcattcctggaaaactacttaaagatggaggaagtgactggcaggacataattaacagggatgctggcagtggaattgcactgaaaactcttaagcgtgtgcagaaaggctggggccaaggaagtatatctagtttacagcctcagcagaatgattttcttgattactatgatggtagtggttaattgtttgtttcgttttttctggatatgtttaccatttttatgtttcaacctcaaaggtggggagaggagggagtagcagatcagagaatgtaaaggtttggggttggagatattgaagacctctttgtaagtaaagcaggtttcattcctttcaatgccaaggataagcagcacgaaaattaattccaaaaccctgtttgagttatgtaaactccccccgcgccccgtttgataattgttggtctgaaaggtaatgatattctgaaacagatcgtgtgatgtacttcaacttgtgtatatgaacaccacaatggctatctagtatttattccacctaaagtggaagtggattatt

SEQ ID NO: 327 - DNA, 809 bp, Glycine max
atcagatatattgttggctgttttgaacattcacccaatttgcagagttccaagttatatacatacactgcataattaagagaaaatgtctctgattccaagtttcttcggtggccgaaggagcagtgttttcgaccctttctccctcgatgtgtgggagccctttaaggattttccatttcccagttctctttctgctgaaaattcagcctttgtgagcacacgagtggattggaaggagacaccagaagcacacgtgttcaaggctgatattccagggctgaagaaggaggaagtgaagctggagattcaagatgacagagttcttcagataagcggagagaggaatgttgaaaaagaagacaagaatgatacgtggcatcgcgtggagcgaagcagtggtaagttcatgaggaggtttagattgccggagaatgctaaagtggatcaagttaaggcttccatggaaaatggggttctcactgtaactgttcctaaggaagagattaagaagcctgatgttaaggccattgacatctctggttaacctatgctactctgttccttagttgaaaatccttgtattatgttttcttctgagggtcatacgagcccaagacagttgtcacgtattattatgctggttttgtttagaggccttatgttaatacggccatagaaatctttggttaaactgtgttaatatgttacttgctttgtaattgcaaaatatatcaagtgatagactagtagctaatgtacatagtgagaagaaataataattttaaatattcctaatcttcatcttg

SEQ ID NO: 328 - DNA, 1779 bp, Glycine max
tgtctgatcataaccttgaggacacctgtgacctgaacactacccttctctctctgtttatgttactaccctaacaagtttgacaaaccccaaaaaagaatcaaactttccctcaaattttcactcttttctgcaccgccagtgatgggagatgggtgcgcggttgagggcaccacggggaattccaattctaataacaataataacaataagaagaagaacaagaagaagaagaacaggggtgggagcaagaagaagatgacccacgaacaggtcttggccttcaagttagtgagtgagtgggttttcttggatcacccttctgcttcgtcttcatcttcttctgctgcttcctgtgttgtcgatgattttggtgttcagaagcctctagggagaggcggggaaaagctcctctttgaattgcattcgcactccaaattcagcgatggcttcttctccccttctaaagttgttgaaagagctcacatcaacggcatcatgacactatgtcaggcattcctgaagctgtagaatcagctcgtaaatatggcatcaagataatcccaggtgttgaaattagtaccatattttctccaagaggagactctgaagtagaggaaccagttcacattttagcatactacagcagtattggaccatcaaggtttgaggagctggacaagtttctatcaaatataagggatggacgttttcttcgtgcgcagaacattgtcttaaaactgaacaagctcaagttgcctcttaaatgggagcatgtttgcaggattgccggcaagggggttgcccctgggaggcttcatgtcgcccgtgccatgcttgaagctggttatgtagagaatctcagacaagccttcgctcggtatctctttgacggtggacctgcttactccacgggaagtgagcctctggcagaagaagcaataaaaatgattagtcatactgggggtgttgctgttctggctcatccatgggcattgaaaaatccagttcccattgttagaaggttaaaagaagctggtcttcatgggatggaggtctacaaaagtgatggaaggctggcagcatatagtgacttggctgatgcctatggacttctaaagattggagggtcagactatcatgggagaggagggcacaatgaatctgagctgggaagtgtgaaccttccagtgatagtgttgcatgacttccttaaggtagctcggcctatctggtgcaatgccatcagggagatattagagtgttatgctgaggagccttctgattctaacctagcaacaattactaggtttgggagaacctggagttttaagggaggttcaccctttagttgtggacaggacttgattgatcattgtttacctctctggttgtctagccaggagatggaaaatgcagagtttgaagctatcaagttaaagctttccaatgtttcagttagtcagggaggaattcaggttctcatagagactaaataaaagttgtgtaacttgatatgtcaccttaaatcattctcagtattgttggcagccaaatcttaatattaaatttgttagtcaagttcaaatgtctattgattctttttgaaaattttctatgacctttgagcaaacatttctcatattattgttttatcttctacactgatgtatttttcttttctctattttttcttaatgcaaacttgtcagaaaaggttgtatgtacaaaaattgaaacaggagggtttccttcttcaatgattgatacatgtttcga

SEQ ID NO: 329 - DNA, 498 bp, Glycine max
atgatgggtgtaggagctgttaagagagatgaaaaggctatgctacttgctggttttgcaggattagttgcaggaacttgtggcatggcaataggagagtttgttgctgtgtgcactcagtatgaagttgagctaggtcaaatgaagagagacatgaacatgactgtgggagaggagaaagacttggagatggggatggagaaaagagcattgcctaatccattgcaagctactttggcatctgcagtgtccttttcaattggtgcattggtgcctctactttcagctgctttcatagaaaactacaggaatagggttattgtggttgtggcaatggctagtttggctttggtggtttttggaagggtggtggctcagctgggaaaaactcataagatgaaatcttgtgtgaggttccttcttggaggatggatagccatggctattacttttgggttgaccaaattacttggtgctaaagctttagataatgaataa

SEQ ID NO: 330 - DNA, 1216 bp, Glycine max
agttaccaagcatatagagtgtgaacatatatattttttgggtatacacttaaaaatcagatatcgactagaagtggttgttgaagcagtttggttttatgactcattgaaacccaacgatgcggagaggcaacgctgatagctagaggacatgcttcataggttaagcagacgctgcttttgcacctttactccacgcccttggcttttcgtgggcttgggcaaccctggcgacaagttcaaaggaaccagacacaatgttggctttgagatgattgatgcatttgcggagtcacaggggattcctatggacactgttcactccaaagctatttttggaaaaggttttgttggtgaagttcctgttttccttgcaaagcctcaaacttacatgaatctcagtggtgaatcgacaggaccactggctgcttattataagctacctcttaatcaagtgcttgtgttccatgatgacatgaacttgccctgtggggtgcttcgtcttcacgacaaagggggtcatggaagtcacaaagggctgaagagtgtgatctataacttcagaggaaatagagaatttcctaggctgagaattgggattgggagtcctcctgggcaaatggatcctaaagcatttttgcttcaaaagtttaatgtaacagctaggcaacgaattgatgaggctttgcaagaggggattgatgccttgaagctccttttatctaaaggtttgacagagagtgcaaaaagattcaataaagaacaaaagtataagcacttaagagtgcagaatttaccagtttcataggattccatgatagcatgttgcattataagtatgattatgattaattcttcactttttaggttgcaatacatgtgtaaaacttagcgataggaaattggcttaattttgtaacattccagagcttgatatagcttttaaaatggtttatgaccaagttttttccatcttgatttgttttaattggatactgtctctgtaatgtgcatttttcacactcgagtgcacacggttgggataactgatcacgcatttaagcatttggatattcgacttgggtgttactagaaaatgaagattagggacttaaattatactagctatgtatgtgtcttgatatggagggtagctaggaggtacaaatacttgtataaggacaggaaaataaatgatttagaaggattgaaccac

SEQ ID NO: 331 - DNA, 1720 bp, Glycine max
aaaaacctcaatttcttatcctttgctttacacactaatccattccatcaaatgattcaaatgcactcaatctcttttttcaattttcataccattttcccagttactttccttacctaaccctgctactccttttcatacatataaatagtcacaattttccagaggcaaaacccagagctttaaggcgctgtgcttagattcaaacatgcccagtttcatttttttattctaaaatctaacgtttgaggttttgaaatattgattggaagaatttatatagggattatggaccaagcaataagcaaaggcagtggtgagattttgaatcatgttgatgaaagggtggatgaggatttgaaccaattggttgaaggaaaagcaattgatgcaggagctggacatagcttgggtgaaggagttagtgtaagtggagaagatgggacttcagaagagatgtgcaatgatcttagattgaagaaagagctaaaggagggacctcaagaagttaatgatcagaacatgggtgacccacaagaaattaatgatacattgcatggggttgatcaaggaactagttatagttcaagagatttggttagtggggaagtacctgagacttgtgttgttatagatccttttactcagattgagtgtgtcaatggagataataggaaattggaagcaaaacctaaggaatcagggttgaacaaggtgtccatgaaagtgacaaaaggggtgtctgagactgataaaaattcatgtgtgattgatataaaccgtggcagctgtgatggctttagcgagaatttggaaggtgaaatgatttgtaggatttgccatctggcctctgggcaacgattggaagcagcagatgttggcactgcaagtagtgctactactaatacagatttgattcagctcggttgtgcatgtaaagatgagctagggattgtgcatagtcattgtgctgaggcatggttcaagcttaaaggaaacaggttgtgtgaaatatgtggtgagactgcaaaaaatgtttcggatgttacggataatggatttattgaagagtggaatgatactagattcatggacagtgataatacctcatccagaaggtttggtggatgcttgtgcggacaaccattttgtaacttcttaatggcatgcctggtaatagcttttgttctgccatggttcttccgtgtaaatatgttctagtggaggagtcaaacactattctttccttcaaatcttcatccctgcctaaatgatgagtgcatcattggttccttgcatattctttttctgaaggggtggtaatgcttaaccatgaccaacttcacatttctcagggtatgtagttccctgaagccttgaaatttggttgtaaagaaacttaccaacttggcaagttatggccaaattgtttcccaattgcattcttttgattggagtgcgtgtggcgtactgagatatatatataactgcgggattcaatttatgaaggagtaaagcaaagaagatattgtacttgtggcataaatgctaagttagaaacagtacattattcgctgtaaaacaatcaaacataaagagcctctccttgattttccttctctctttttcgttttttcacctttttctttctttctttaataatctctgtacacttgtctgctaatataaagttcaaagaatccaatgtcatttgttgtca

SEQ ID NO: 332 - DNA, 1613 bp, Glycine max
ttttttcaattttcataccattttcccagttactttccttacctaaccctgctactccttttcatacatataaatagtcacaattttccagaggcaaaacccagagctttaaggcgctgtgcttagattcaaacatgcccagtttcatttttttattctaaaatctaacgtttgagggattatggaccaagcaataagcaaaggcagtggtgagattttgaatcatgttgatgaaagggtggatgaggatttgaaccaattggttgaaggaaaagcaattgatgcaggagctggacatagcttgggtgaaggagttagtgtaagtggagaagatgggacttcagaagagatgtgcaatgatcttagattgaagaaagagctaaaggagggacctcaagaagttaatgatcagaacatgggtgacccacaagaaattaatgatacattgcatggggttgatcaaggaactagttatagttcaagagatttggttagtggggaagtacctgagacttgtgttgttatagatccttttactcagattgagtgtgtcaatggagataataggaaattggaagcaaaacctaaggaatcagggttgaacaaggtgtccatgaaagtgacaaaaggggtgtctgagactgataaaaattcatgtgtgattgatataaaccgtggcagctgtgatggctttagcgagaatttggaaggtgaaatgatttgtaggatttgccatctggcctctgggcaacgattggaagcagcagatgttggcactgcaagtagtgctactactaatacagatttgattcagctcggttgtgcatgtaaagatgagctagggattgtgcatagtcattgtgctgaggcatggttcaagcttaaaggaaacaggttgtgtgaaatatgtggtgagactgcaaaaaatgtttcggatgttacggataatggatttattgaagagtggaatgatactagattcatggacagtgataatacctcatccagaaggtttggtggatgcttgtgcggacaaccattttgtaacttcttaatggcatgcctggtaatagcttttgttctgccatggttcttccgtgtaaatatgttctagtggaggagtcaaacactattctttccttcaaatcttcatccctgcctaaatgatgagtgcatcattggttccttgcatattctttttctgaaggggtggtaatgcttaaccatgaccaacttcacatttctcagggtatgtagttccctgaagccttgaaatttggttgtaaagaaacttaccaacttggcaagttatggccaaattgtttcccaattgcattcttttgattggagtgcgtgtggcgtactgagatatatatataactgcgggattcaatttatgaaggagtaaagcaaagaagatattgtacttgtggcataaatgctaagttagaaacagtacattattcgctgtaaaacaatcaaacataaagagcctctccttgattttccttctctctttttcgttttttcacctttttctttctttctttaataatctctgtacacttgtctgctaatataaagttcaaagaatccaatgtcatttgttgtca

SEQ ID NO: 333 - DNA, 1095 bp, Glycine max
atgcaggcaatgctagttctggttgagagaatcctgcacaacattatccggttcacaggaaatcagaaatcgttattcttgtctcccttgctaccagcagcaatcttgcagcatcattcttcaggatcaggattatcaaacgtaatccttaaggtgaaagaaacattctttgctttcttgctctttgtactgagttatcaaaacaactctgtggaggatgatgctaccaagtaccttctttgctttcttgctctttgcactgagttgcttcagatggctggaatatgcagaatcaaaactaccccaagtggaggattctgcactggctttagagtaagtatcttcaagcagctcaaccttcctagcatgcttccaccttatttggttaagcttcctcacctcagacatgttgattttgctttgaactacctaagtggtacgatcccaaaggagtggggttcaacaaaactaactaatatctctctatttgttaatcgtatatcaggggaaattcctaaggagttgggaagtattaccactctaacatacttgaaccttgaagcaaaccaattttctggtgttgttccccatgaacttttacgggtgacatttgctaagtttcagaatttgacagatttcaggataagtgataacagtttcaacggagaaatacctagcttcatacagaattggaaattacttcaaagattagaaatgcatgcaagtggactggagggacctaccccatcaaatatatctcttttaagtaatttaaatcagttgaggattggtgacataaatggtccaagtcaggactttcctatgttaagaaacatgacaggaatggcaatattggttctgaggaattgtcatattactggagagcttcctatttacttctggagtatgaaggatttgaatatgttggacgccagtttcaataagttggttggggaaataccagtcgctgcgcatgtggggcatctgagatttcttgacctttcttacaacaattttatgtggcaagaaccagatcaacctgcttgtagagatgacctgtcagaatgcaaagtctttcacaataattattcctga

SEQ ID NO: 334 - DNA, 1095 bp, Glycine max; identical to SEQ ID NO: 333

SEQ ID NO: 335 - DNA, 219 bp, Glycine max
atgtctgacattgctatgctggtggctgaggagtacgagaggagggtcaagagtttaagaaagtccggtggtggaactggagccggggaatttgacatggtttcttgtgtttcggtgatagtgtcgaggctcaaggaaaagaaacaacttctgcaatgggttttggagcccaagactcaagtcgctatggctgcttccaacagcttcttctctgcttaa

SEQ ID NO: 336 - DNA, 1809 bp, Glycine max
atggcaaatgagggatcatcaaatccttctagcactgattctggatggaaatattgtactcgaggacaaggaaatagttgtgtatgcaatttctgtggcaaggttacaaaaggtggaattactagagcaaaagaacacttgatggcaaagcctggcaatgttgcagcctatgccaaatgtcccaaagaagttagagaagaactatggggatatttgaaggatacaaagaagcaagagagtgaaacatttcaaaggatgcgtcaacattttcttgaagactatggtgatagtgatgaagaaagagctcttgatgaaggggttcatcaatacatagctcgattttggtaccaagctggcttgtctttcaacctagtcaagctgcaaagctttcacaaaatgcttacaaatgtgggagcctttggaccaaatttgaggcctccttcttatcatgagataagagttccacttctggccaaggagttagagaacacagaaattttgttgaaagaccaaaaggagctatggggaagatttggatgctcaattatgtctgatgtatggacagacagaaaacagagatctatcattaacttcttggtgaattgtacagcagggacaatgttctataaatcaattgatccatccaattttgtgaaatctggtgaaaagacatttgagttgttggactctattgtggaagagattggggaggaaaaggttgtccaagttataacaggcaatggaagcaactatgttttggcaggtaaatttcttgaacgaaaaaggtcacatttatattggattccttgtgcagcccattgcatagatttgatgttggaagacattggtaagttgccattgataaagaagacaattctaagagcaatatcccttgttggcttcatctatagccattcaagtactttgagcttgttgaggtttgctacatccttcctcacattagaaaggctccataaggagaaaggcaatcttagaaagatgtttgtatcagatgattggacaaataataaattgtccaaggaagccaaagggaaggaagcaacgaaaactgtacttatgtcagctttttggaataatgtgctctatatacttaaggtgatggctccacttgtgaaggtgccgcatcttgcaatggagaaggcaaaagaagctataaggaagtcatttgaatataatgaaagcaagtataaagaagtgtttgaaattattgacagtaggtggacttgccaacttcatcaccccttgcatgcagctggtcactttctaaacccagatttattcttcagcaatcattctatggaatttgattttgaggtggtaaatggattaggtgagacaaaagattcttacagagctaccatttataaaatgggtggtggtatgtttggagcaaaatttgctattcaacaaaggagcattgtctcaccagcgcaatggtggctatcatatggattgtcaactccaaatttgcaacacttggcaattaagattttgattttgacatgtagtgcgtcgggatgtgaatgcaattggattgctcataatttttttttctcatatttgttacatattcattccaagaaaaggaataggcatgaacacaaaagactacacaacttggtgtatgtcgaatgtaatcaagcattggttaaaagatacaattatagagatgaaattgatccaatttcactcaatgatattgatattcacaagtggcttgtggggcaaatggatggtgatgacgaaaatgatgatggccttccttgggacgtagtttttgaggaatag

SEQ ID NO: 337 - DNA, 1398 bp, Glycine max
aaccattcttcaactttgtctatgcaccgcaaaatgctataaaaaatgtgagctgttaatttaaggaatgtaaacacattggctatggccagcactgtggttagcctatcctcaatagtcttgctttgcacgataacagcagttcaagggaggaaaacacttcatcacctaaacaatgaatggctaacatcttattcagttattaatgacattgatggtatttgtaaaacaatggtagagacacaaggttacacatgtgaggaacatcaggttacaacagaggatggctacatcttgagcctgcagaggattccggtagggcggtccagtaacaacactgacaagccgccggtgctgttacaacatggtatcttttgtgatgctctaacatggctggtcaattctccagatgaatcattagggtttatcttagcagacaatggatatgatgtgtggcttgccaatactcgtgggacgaaatatagtaacaggcacatatcacttgatcctgatgacatggcttattgggattggtcatgggatgaattggctagttatgatcttcctgcctttgtccaatatgtgtacaaccatactggtcagagaatacactatgcaggtcattccttgggaactttaatggctttagcttctttctgtcaagggcaagtggtgaacatgttgagatcagctgcattacttagcccaattgctcatatgaatcaaattacatcactactaacaaaaattgctgctgacgcatttctagctaatgacatatactggttaggactccgggaatttgttccaaacggggatgttgcagcaaaatttgcaaaagacttatgccatattctaaacttcgactgctcaaacctaatgtcacttttcgcaggtccaaattgctgcataaattcgtccacaatagatgtctttcttgatcatgaaccaccgccaacagcaactaagaatttggtccatctatcccaaatgatcagaacaggaacaatagcacagtatgattatggcaatcaagaacaaaacatgcaacactatggacaaccacttcctcctctttatgacatgaccggaattctgaatgaattccctcttttcatcagctatggagggcaagatactctatctgatgtaaaggatgtgcaggttttgctcaatgacctcaaagatcatgattggaacaagctcgtggtattgttgaacgaagactatgctcatgttgattttgttatgggtgttaatgctaatcaaatgatctatgatcctatgatggatttcttcaaggttaattgattttatactattgctagtcgtactttaaataatgtaaatatttttgcatcaagttagatcaatagaatatgctacatttcctctcta

SEQ ID NO: 338 - DNA, 1419 bp, Glycine max
atggattcagttgcattaaatggcaaaagcaatgataagcctcttcacgttgccatgctcccatggctggccatgggtcacatatacccttacttcgaagtcgccaagattcttgctcaaaagggtcactttgttaccttcataaacagccccaaaaacattgaccgcatgcccaaaaccccgaaacacttagaaccattcatcaaactcgtgaagctacccttgccaaaaatagagcatctcccagaaggcgcagagagcacaatggacattccgtccaaaaaaaactgtttcctcaagaaagcttacgagggcctacaatacgccgtttccaagttgctgaaaacgtcaaaccctgactgggttttgtatgacttcgcagctgcttgggtcataccaatagccaagagctacaacattccttgtgctcactacaacattaccccagctttcaacaaagtctttttcgatccaccaaaggacaaaatgaaggattactcgctcgcaagcatatgtggtcctcccacgtggcttcctttcaccacaacgatccatatcaggccttacgagtttttgagagcatacgaaggtaccaaagacgaggagacaggtgaaagggcttcttttgatctcaacaaggcatattcaagctgtgacctttttcttctaagaacctccagagagcttgaaggagactggttggattatcttgctggtaattacaaggttcctgtggttccagttgggttgcttccaccatccatgcagataagggacgttgaagaggaagacaataaccctgattgggtcagaatcaaggattggttagacacacaagagtcgtcatccgtggtttatattgggtttgggagcgagttgaagctgagtcaggaggacctcactgagttggcacatggcattgagctttcaaatttgcctttcttttgggcattgaagaacctgaaagaaggtgtgcttgagttgccagaagggtttgaagaaagaaccaaggaacgtggcattgtttggaagacttgggcaccccagcttaagatcttggctcatggagcaattggagggtgcatgagtcactgtggctctggctctgtgattgagaaggttcattttgggcacgtgcttgtgactctgccttatttgcttgaccaatgtctgttttcgagggtgctggaggaaaagcaagtggctgttgaggttccaaggagcgagaaagatgggtcttttactagggtcgatgtggctaagacattgagatttgcgattgtggatgaggaagggagtgctctaagagagaatgccaaggagatgggcaaggttttcagttccgaagaacttcataataagtatattcaagatttcattgatgcgcttcagaagtataggattccttccgctagctaa

SEQ ID NO: 339 - DNA, 2604 bp, Glycine max
atgttagggctatttgacaagagccacaagatcaagggcactgtggtgttgatgcccaaaagtgtcttggacattaacgacttgaattcagtcaaaaatggcggagttggtggcgttgtctctggtatctttggcgccgtcgccgacgtaaccggccaaatagttgatactgcaactgccatcttttcccggaacgtctccttcaagttgatcagtgctacctccactgatgcaaagggaaatgggaaagttggaaacgaaacctttttggagaagcatcttccgacgctaccaaccttgggagatagaagggatgcatacgatattcatttcgaatgggatgctaactttggaattccaggagcattttacatcagaaactacacctatgatgagttcttccttgtcagtgtcactcttgaggacattccaaatcatggaaccattcacttcgtctgtaactcatgggtttacaactttaaagactacgacaaaaaggatcgtattttctttgccaataagacatatcttccaagtgcaacaccgggtccattagttaagtatagagaagaagagttgaagattttaagaggagatggaacgggagagcgcaaggaacatgaaaggatctatgattatgatgtctacaatgatttgggtaatccagatgaagatgtaaagcttgctcgtccagttcttggaggctccagcacctatccttatcctcgtagggttagaactggtagaaaagccaccaagaaagatcctaaaagcgagagaccagcaagcgagctttacatgccaagagatgaaaaattcggtcacttgaagtcatcagatttcctcacatatggaataaaatcattatctcaaaagctcttaccttcgctcgaaaacgtttttgattcagacctcacatggaatgagtttgatagctttgaagaagtaagagacctgtatgaaggtggaattaaggttccaacaggtgttcttagcgacattagccccataccaatcttcaaggaaatctttcgcactgatggtgaaagtgtccttcaatttccaccacctcatgtagtccaagttactaaatctgcatggatgaccgatgacgaatttgcaagagagatgattgcaggtgtaaacccaaatgtaattcgtcttcttaaagagttccccccacaaagcaagctggatccctctctctatggtgatcaatctagtacaataacaaaagaacatttggagattaacatggatggggtaacagtagaagaggcacttaatggtcagagattattcatattagattatcaagacgcattcatgccatatttgacaaggataaacgcactaccttctgcaaaggcttatgccacaaggacaatcctgctcttgaaagatgatgggactttgaagccacttgctatcgaattgagcaagccacatccaagtggagataatttgggtgccgagagcaaagtggtcttgcctgcagaccaaggtgttgaaagcacaatttggctattggccaaggctcatgttattgtaaatgactcgggctatcatcaactcatgagccactggttaaatactcatgcagtgacagagcccttcatcatagcaacaaacaggcgtctcagtgtgcttcaccccatttataaacttctttatcctcactatcgtgacaccataaatatcaatggacttgctaggaatgccctaattaatgctggtggcgttatagaggaatcatttttgcctggacggtattctatcgagatgtcttcagctgtttacaagaattgggttttcactgaccaagcattaccggtcgatctcatcaagagaggaatggcagttgaggatccatcctctccccatggccttcgtcttgcggtagaggactacccatatgctgttgatggactagaaatatgggatgctattaagtcatgggtccaagagtatgtttccttgtattacccaacagatttggcaattcaacaagatactgaactccaagcatggtggaaggaagttgttgagaagggtcatggtgacttaaaagacaagccttggtggcctaaaatgcagactcgtcaagagcttattcaatcatgttctactatcatatggattgcttcagctctccatgcagctgttaattttggacaatacccttatggtggttttatcctaaaccgtccaactcttagcagaagatggattccagaaccaggaaccaaagaatatgatgagatggtggagagtccccaaacggcttatttgagaaccattacaccgaagcgccaaaccattattgatcttacggtgatagagatattgtcaaggcatgcttctgatgagatctaccttggggagagagacaatcctaattggacatctgattcaaaggcattagaagcattcaaaaagtttggaagcaagctggcagaaattgagggaaaaatcacagcgagaaacaaggattcaaataagaaaaatcgctatggaccagttcagctgccatacacattgctccttcctacaagtgaggaagggttgactttcagaggaattcccaacagtatctctatctaa

SEQ ID NO: 340 - DNA, 3059 bp, Glycine max
tactataataatacttttggtaaagtttttttataaggaaaaaaagaaagaagaagagaaaggcacaaaagtagaaagcatgcacgtggaattcaaactcttctaatcctgtgttttttccttcttttctgtctttttccctccaccacctttttagttttgtgtttatcatctcttcaattcaattcaaagttcaaaaacttctcgtcattccagtttgtatgaccccacacgtacatacaacacaccgtctttaattttccaccctttggacggtgctagctttttccaacacatttgattttctcctcggaattcttcatttttatggcattttcttcaaccccttttggccaaaacggatctttcttctgcccatttgaatctttcttttgaatttgtgaaaacaaatgcccctttgaattgttgaaggagggaaagggggaatttattgttatttttggcttttaatttccctcgtgcattgggtcagggggtttgaagatgaaagagcatggaaatgaagaacctgtttttgaaattggggtggtgattcctaggagagtggttcaggaaaaagatgaatcatgtgactgtgcatacgtccttgtaaaggagtttgagaaggtggggtttgtagttgagagagttattggcattgcagatgagttcatcaagttggctgcacctttggagacattagggagggctgcggctgaactacaaatcaagaaacagactcttattggtatggatttgcaatttgaggtggaggaggttgaagcttttgtgaaacagcctgatggttctgttttcagttggtatgagcgttttcagtgctactgtcacttgatatatggaacagtaaacaacagcaagtcggtaaaaacccttaaatttgatggaaaagaaatccattgggaaattggggagaatctgcttctgaaattggaatcattggaaattgttaagcaagtctttcctttgcatgatgaaaagaagagaaagaaacttcttagaagttgggcacttcaatggtgggacttcactagtcagccaatcgatgagatttattcatattatggggcaaagattgcaatttattttgcttttcttggaatgttcacacggtggatgctcttccctgctgcatttgggcttactttgcaattgatagactttgggtcattgaaattagtcgtgcttcctattttcttcatcatggtgatactttgggctataatgttttctcagttctggaaacgtaaaaattcggcacttttagccagatggcctattagttctatagttgcagttgaccaaggatacaagatttcaggcaggaagtccagctcctggcagcccccaatggaactcatgaaagtatttgagactgatagagctaaagagaaggaaatattccagagacatgagtggcttgggcgtcttatgcgattcagaaatgatgctatcattatcttcagcattatatgcctccagttaccatttgagttggcatatgctcatctttatgaagttcttgattctgatataattaagtttgggctcactgctatttaccttttcgccattcagtatattaccaagattggtggcaaggtgtctgtcaaacttatcatgaatgaaaacaatgagaacacagaaaaacgggctgatagcttggtctacaaggtgtttggtctgtacttcatgcagacatacattggaatcttttatcatgccttgttgcatcgtaatttttcaactcttcgccaagtgttgattcagcggctccttctttctgaggtgttggaaaacctggtggaaaattcattgccttatctcaagtatagctataaaaagtacagggttcgacacaagaagaatgagaaaggagaagcaagagaaaagttccagtttagttctagagtagagaaagaatacctgaagccctcttactctgctagcattggtgaggagcttgaagatgggctatttgatgaacaaccttatggagatcaggacagatgcattgaagctgctagtaattttgaggcggcctgttcctcgtgccgctgcaacagtaggagcctggcttaacatatttcagtttcttatactgatgtctatatgcaccaactgtgctcttttagcatggctatatgatgaggagggaaaatggaaaatagagcctggacttgcagcaattttaatcatggagcatgtcctcttgttgactaagttcggtttctctcgcttcattcctgaggaacctgcttgggtaagagccaaccgtgcaaaacacactacacaggcacaggatatgtgttctaagaagcttttaaggactatttccggaggagtcaagacttttagagaggagaaaaaattggactgatgcctttccagcttattgtttacttcattgccagatcaacacgagggaaagaaagcttatgctggattgtctttctgttatctcagctatccatggctgaattgtatattaagaagggattttgctttggttgacctgtttgtcttccctcccctgtgctgataagatagttcatacaaccctacagttagtgttctcccttttaaattgtacatatgaaaattgctaactactacaagttttgtcgagaagtcagtgaaacaaggatggtatctttttgaggcatttaaatttcattatagttgtttgatgaagaacttgaggaatgaccaaaggtagtgaatgacaattgacaacacagctgtggtggctacctgaaaatataaattgcacagaccaatctcatgtattgagtattgacttgtccaaaagatataagtttggctcacgaaagttgatatgctgtgaaaaagactataaagctattcaatgatttgactaggacacatttagattgttttcattattatctgttacctttgaattacaaaactgttaccttcttgtaaatctataggaaatagagaaaacgaagagaaaaaaaatgttgacaatgtttctggtacaaatatttgaaaacagatgacaattttggaaattg

SEQ ID NO: 341 - DNA, 3107 bp, Glycine max
taagacagtatcttccaaagaatttctaaaccaacaattactctcacaaactacattgccgggtaaactactgcggcatgactttagcagtataaaatgattatatgacactcatctttctcttcctaagcaaaacacgatacatcaaacaatgatgggaatgttattgcagtttctttatgtattgtttggggtacttatttctgtggttctggttcaagcacaggatcaatcaggattcattagcattgattgtggtctacctgaatcctcaagctatactgagaagaccacaagcatattttacatttcagatgccaaatttatagatgctggtgtaagcaagagtatttcaccagcagagaagagtactcatctacaacagctagcatatgtgaggagttttcctagtggagagagaaactgttacagaataaatgtaaccagtggtactaaatatttgatcagagctactttcttttatggaaactatgatggcctcaatcagccaccacaatttgatcttcatcttggacctaatttatgggacacagtgagcttccccaatgcatcactcagcgaaatcagtgaaatcatttacaccccatcactagattacatacatccatgtcttgttaacaaaggtcaaggggctccattcatttcaaccatagaattgaggactttgaaaaatgcttcctatgtcacagcgtcagctgaatcattggcatactatcggcgatatgatttaggttccatcaccaacttagtatacaggtacaactatgatgtttatgaccgcatctgggtgccacatggattcaaccagtggacacaattaagcagcacacttaatcatgatatattccagaatgattacaaattaccagaagttgtcatgagcactgctgctacaccaataaatgctagtgctccatttcagttctattgggatccagataatgtgaatgagaaattctacatctacatgcactttaacgaggttaaaattctggcagaaaatgaaactagaacattcaatatcttcatgaatggcaagttattctatggacctctgactcctggatatctgacgaaaaatatcatatatagtacatcagctttgaccggagctacaaggtatctattttctcttgctaagacagggacttctacccttccacccatcatgaatgccatggagatttataaagtaatagattttgctcaatcagaaactgaacaagatgatgttgatgctatcacaaacatcaaaaacgcttatggggtggatagaaattggcaaggagatccatgtggcccagtagcatacatttgggaaggtctaaattgtagttatgataacaccccaagaatcacatccttgaatttgtcttcaagtggactgaccggacagatattatctttcatctccgagctcactatgttacagtatttggatttatcaaacaatagtttaagcgggtcagtacctgattttctgacacaactgcaatcacttaaagtcttaaacttggcgaaaaacaaccttactggtccagttcccggaggacttgttgaaagatcaaagcaaggttcactatcattgagcctggatcaaaatccaaatctatgtgaatctgatccatgcatccagcagacaaataacaagcagccagatggtgatcaacagaagaacaaaaataatatagttatcccggtagtagcatcagttgctggggttttggtgctcctaataattgtagcagcagctataatctgtggccttaaaaggaaaaaaccacaagcatctgatgtaaacatttatgttgagacgaacactccaaatggatcacaatttgcatccaagcaacggcaatatacattcaatgagcttgttaagatcaccaacaactttaccagaattcttggtagaggtggatttggaaaagtttatcatggatttattgatgacactcaagtagctgtaaagatgctttctccgtcagcagtacgaggatatgaacaattcctagcagaggttaaacttctgatgagagttcatcatagaaatctgacttctcttgttgggtattgcaatgaagaaaacaacatagggctcatctatgaatatatggcaaatggaaacttggatgaaattgtttcaggaaaaagtagtagggcaaagttcttgacatgggaagacagactccaaatagcattggatgcagcccaaggactggaatatctgcataacggttgtaagccaccaataatccacagagatgtgaaatgtgcaaatattttattaaatgaaaacttccaagcaaaattggctgattttgggctatccaaaagctttcccacagatgggggatcttatatgtccactgttgttgctggaactcccggttatttggatcccgagtacagcatatcaagcagattgacagagaaaagtgatgtttacagcttcggagttgttcttttggagatggtcacaggtcagccagctattgcaaaaacacctgataagactcacataagtcagtgggttaaatccatgctttccaatggggatataaaaaatattgctgactcaaggtttaaggaagattttgacactagctcagtctggagaattgttgaaatcggaatggcttctgtgtccattagtcctttcaaaaggccaagtatgagctatatagtgaacgagctaaaggagtgtttgacgacagaattagctcgaaaatatagtggtcgtgacactgaaaacagtgactcaattgagttggtcactctgaatttcacaactgaacttggtcccccagctaggtaatacattcactgataccaaaaaaatgttcctgaaagcagtggtgtgtttcaatttctgtttgctgtacctgaatttattgcagttttgcatgctcaattcttgtagtcttttattcaatggattaatttttctgctattttattctgatgttctgtaaccaagcataagcaactgtactatgatcatgttatacgttatacatatttttaggaagataaaaaaaatatggttcctcagtcatatttatactttatcttcctaatatctc

SEQ ID NO: 342 - DNA, 1474 bp, Glycine max
gcaaagtgagtttccaccgtcattgcatcgtcgtcgcaatcgcagggatctatcatcagaagttccgtgaaatctaatgaggggaggtggatatatggagtgttcggagactcgtggaatggagaccttgcaattggtggctacaaggccatcaaacagacaattgctttcgtttttttgtttattcttgaaatggtgcagctctaccattacaaactaatggatatatcagagtggattgctatggggggctcaatcagatgcgaagagatttctgtgatggtgtgggcattgctcgtctgttaaatgcaacccttgtcttgccgaagtttgaagtggcatcatattggaatgaaacaagtggttttgcagatgtatatgatgtagactactttataaagcatatgaatggctttgtcaaagttgtaaaagagttaccaccagatattgcttcaaaagaaccagttcgaatagactgtagcaaacggaaagggcaatttgattattttgaaagtgttcttccttctctgttgaaacacaagtacatttctatcacaccagcaatgtctcaaagaagggacagataccctttgtatgcaaaagctgctctgtgtcaagcttgttacaaggcattgcgtctcaccagatccttggaaatgaaagcctctcagcttctagatgcaatacctaaaccatttttgtctcttcatcttcgttttgagccagacatggttgcttacagccagtgtgagtacccggacctgtctcctgcttccattaaagccatagaagcagcacaagtggacagaaaaccatggactggagagttagcccgtgtttggagactacgtgggaaatgcccacttacacctaacgagacagctttaatacttcaatctctttccatcccactaacgacaaatatatacctggcagctggagatggtttgatggaaatcgaagggttgatagatacctatgccaacatagttactaaatcaagtcttctcagtagagaagacttcacaagcatgcatggcaacacaaaagctgctttggattattatgtatctattaacagtgattcatatatagccacatattttgggaatatggataagatggtttcagcaatgagagctttcaatggtttgtacaagactctattttttagcagaagaggttttgcacaattaacctcacagggtcttaatggaaaggagttgaagcaagcactatggaagcttcacagagatgattttgcaaagggaagaggctctgctctgtctgagtgtttttgcgaattcaagttgtgattttggatctcggattcatcgtttttgtagttttgacattattaatttaattttgctttgtcactccttagcttctgtcagcttttttattattttgtattgaatgtgatgctttttactatcactaatgaaatttttggcagacatttggtgtaaga

SEQ ID NO: 343 - DNA, 1261 bp, Glycine max
gggccttcactcttgaactgtatgcgtgtgcagtgcagtggtcctctctcgtttttaattttcatggcgaagaaatcacagaaaagcctcaaaaacaacaataacaacaacaccactaggaagcgcacacgcaaaagcgtcccaagagactcacctcctcaacgaagctcaatctataggggtgtcacaaggcatcgatggactggtcgatacgaggctcatttgtgggataagaattgctggaatgaatcacagagcaagaaaggaagacaaggggcatatgatgatgaagaagccgcagcacgtgcctatgacttggcagcattgaagtactggggccaagataccattctcaattttccattatcaaattatgaggagaagctcaaggagatggaaggccagtcaaaagaagaatatattggatccttgcgaagaaaaagcagtgggttctctcgaggagtttcaaaatacagaggcgtagcaagacaccaccataacggaagatgggaagctcgaattggaagggtctttggcaacaaatatctataccttggaacttacgctacacaagaagaagcagccgcagcatatgacatggcagcaatagaatacagaggacttaacgccgttacaaactttgacctgagccgttatatcaattggccacgtcctaaaacagaagaaaatcatcaaaatactcctagcaaccaaaatgtaaactctaatgctgaactcgagctaggttcggctagtgacgagatcacagaagagggcgtagcacgatcttcagagtcagagtcaaatccttctcgtcgcacattccctgaagacattcaaacaatttttgaaaataatcaagattcaggcatctacattgaaaatgatgatatcatttttggtgacttgggctcgtttggtgcaccaatttttcatttcgaacttgatgtttagaattggaggacttcttctggctaataggttattatttttcaaccaaaaaagatgataaagaaattaggggggtaagagtaaacaacttagagatcgagtggaagattctttaaaagtaacatacgaggggggggaaagggattggatcattttatttgtgatagaacaagatgcatgacatacaagtacaacgtactgcctcattttaacaatttagttttattatgtatgtctccacgagcgtgggtagatgtcacaaaatttagtttattataagaaataagaataatatttttttaaaagataa

SEQ ID NO: 344 - DNA, 1324 bp, Glycine max
atcagaaccgtggaatgtgagaagccccagggcacacagctactacaaaaacccgacctatttcatttcacgtgttgtctagcccgccgagaaaaccctaattcgctcgcagtcacccaagaggcgaatccttaccattgctcggtacgttcctattgttccatctttaatcttccattgttcttctttaagtctctgcattttgcttaatccgccatataagtgtttagatctgagatttgaattgattgtacgaacgacagagatgggtgaagaagtgaaggccgtggttccagagtctgttttgaagaagcagaagagagaggaggaatgggcgttggccaagaagcaagacctcgaggctgcgaagaagaagagagccgagagccgcaaactcatctacaacagagctaagcagtacgctaaggagtacgatcaccaggagaaggaattgattcggttgaaacgcgaggccaagctgaaaggtggattctatgtcgatccagaggctaagctcttgtttattgttcgcattcgtggtattaatgccatggatcccaaatcaaggaagatcctgcagctgttgcgattgagacagattttcaatggtgtatttctcaaagttaacaaagccacagtgaacatgctgcacagagttgagccctatgtgacttatggatacccaaatcttaagagtgtgagagaacttatttacaagagagggtatggaaagctaaacaagcagaggactgctctaactgacaactccatcattgagcaggcgctgggcaaatatggaatcatttccactgaagatctgatccatgagatcatcactgttgggcctcactttaaggaggctaacaacttcctttggccatttaagctcaaggctcctttgggtggcttaaagaagaagagaaaccactatgtcgagggaggtgatgctggaaaccgggagaattacatcaatgagctaatcaggagaatgaattgagctgtggcactgttcaatcatttgattagttgaatgaatcttttcttgttggcttttagatcaatatcagacgattttcgtatctgaaattttgagaatagcacatttatgactttgctaaatcttttttgctaaggttgaatttttttcgtttttacaagtatgagtggtatattttattacacaacattcccattatttatatgcgtagctttctgttctgcaatttttggtatgaaaccatgttgattttgaatttgttctcgtctcattctgaaattattttggtgttttacaaggcctttttgcgcaagtcaacgattagta

SEQ ID NO: 345 - DNA, 1928 bp, Glycine max
atgcatataaactacaaacattatttcatccaagccctcttgtctcaacaaattaataataattaatcacgcccttcgatcttcgagtcatctaataataaatcttttgtttcccatcaacactagttcatgcaaattaatgggtatccctcactttctttgtataccatttccagttcaaggacatgtgaaccctcttatgcaattttctctgcttttggttaaacatggttgcaaggtcacttttgtacacactgagttcagcctcaaacgaacaaagacttctggtgctgacaacctcgagcattcacaagtaaagttggtgactcttcctgatggtttggaggctgaagatgacagaagtgatgtgacaaaacttcttttgtctatcaaaagcaacatgcctgctttgcttccaaagctcatagaagatatcaatgccttggatgctgacaataagatcacctgtattattgttacatttaatatgggttggcctttggaagttggccacaaactgggaatcaaaggagctcttctctgtccagcatctgcaacttccttggcttctgctgcttgcatcccaaagctgattcatgatggcattattgattctcaaggacttcccaccaaaacacaagaaattcaactctctccaaacatgcctctgatagacacagaaaactttccatggcgtggctttaataagatcttctttgaccatcttgtgcaagagatgaaaactttggagttaggagagtggtggctttgcaacactacttatgatcttgagcctggagcattttccgtatcaccaaagttcctacccattggcccattgatggaaagtgacaacagcaaaagtgcattttgggaagaagatacaacttgcttagagtggttagatcaacaaccacctcaatctgtcatatatgtttcctttggcagtttggcagtaatggatccaaaccaatttaaagaattagctcttgcacttgatctccttgacaagcctttcatttgggttgtacgtccatgtaatgacaacaaggaaaatgttaatgcatacgcacatgatttccatggaagcaaaggtaaaatagttggttgggcaccccagaagaagatattgaaccaccctgcattggctagcttcattagtcactgtggttggaattctaccctagaaggtatatgtgccggtgtacctttcttgtgttggccatgcgccactgatcaatatcttgacaagtcatatatatgtgatgtgtggaagattgggcttggactagacaaggatgaaaatggaataatttctagggaagagataaggaagaaggtggatcaactgcttgttgatgaagacatcaaagctaggtcattgaaattgaaagacatgaccataaataacatactagaaggtggtcagtcatcaaagaatctcaacttctttatggattgggcgaagtaattatgcttaatttggttctatattgaaaagtcatgtgtaatttctacatgtaagaatttaatttctatgtagatcttaatgtaatctatttaaaaattaataagctttattatatgcaatgatttttagttttatgacattataataggagtatgtgagtcattttgggttaggtttgataaaacttatgatccattctaattaaatttgaaagagttgttttgagtaaatttttaatatctaatccaaattaattggtttttttaaacagattgagttagatttactagttaaaatatttaataaaatttatatattattttttaaaatataatattttataagctaaatttttttatttaatgaaatatcaaatagaatacttataactgttattatgtagtcaaatggtgaaaaaagatgaaaaaatcacattgttatgatgtattatcttgat

SEQ ID NO: 346 - DNA, 1065 bp, Glycine max
atggcttctagcaatggccgaaaagcaagtgagatctttcaaggccaagctctcatatacagacacatgtttgccttcatagattctatgtgcctcaaaacgattattgagcttggaataccagacataatccacaagcacggccaacccattactctttctgagttggtgtcaattctacatgttccaccagctagagtaggtcacgttcagagcctcatgcactacctgtcacaccatagattctttgaaagtgtaagaatccatgaaaaagaagcatatgctctcactgctgcttcagagctacttgtaaaaagcagtgaactttctttagctccaatggttgagtacatccttgatccaactctatcagcttcattccatcaaatgaaaaagtgggtttatgaggaagatctctcagtatttgatatctccttagggtgtagtttatgggattttcttaacaaaaaccctgcatacaacgagtcattcaatgaggcaatggctagagattctcaaatgagtaatttggcattgagagattgcaagttggtgtttgagggactggaatccattgtggatgttggtggtggaactggagccactgccaggatgatctctgaagcatttcctgacttgaaatgcgttgtgcttgaccgtcctcacgttctggagaacttgtccgaaagcaacaatttgacatatgttggtggggacatgttcaaatctattcctaaggctgatgcagttctgcttaagtggattcttcatgattggactgataaagactgcataaagatattagagaattgtaaagaagctatttcttcaaataatggcaaaagaggaaaaataatcgtcatagatatggtgatacaagaaaagcaagatgagcataaagttacagaactaaagctcctttgggatgtagccatggcatgtgtattaaatggaaaagagagaaatgaagaagaatggaagaaactcttcatggaagcagggttccaagactacaaaatatctcccttgaccgggtttctgtctcttattgagatctatccttag

SEQ ID NO: 347 - DNA, 180 bp, Glycine max
atgccactcaaacccagagctagctggttctccccgaaatgcattgaggtgcagcagttgactagacatctagaggtaaagcactatttcgatgcgagccacgagagtggtactaaatcgaggcaaactctgaatactagatatgacctcaaaataacaagggtcaagttcggccagtga

SEQ ID NO: 348 - DNA, 734 bp, Glycine max
agaacatgaaactatatgctcccaagcagtgggaggaggctcgggactctaaccgcgtgcctattgaagaatgaattggcgactcataggcagtggcttggttaagggaaaccaccgaagccgtagcgaaagcgagtcttcacaaggcaattgtcactacttatggacctgaacctgggtgatctatccatgaccaggatgaagcttgggtgaaactaagtggaggtctgaactgactgatgttgaagaatcagtggatgagttgtggttaggggtgaaatgccactcaaacccagagctagctggttctccccgaaatgcattgaggtgcagcagttgactagacatctagaggtaaagcactatttcgatgcgagccacgagagtggtactaaatcgaggcaaactctgaatactagatatgacctcaaaataacaagggtcaagttcggccagtgagacgatgggggataagcttcatcgtcgagagggaaacgactcggatcaccagctaaggcccctaaatgaccgctcagtgataaaagaggtaggggtgcagagacaaccaggagatttgcctagaagcagccacccttgaaagagtgcgtaatagctcactgatcgagcgctcttacaccgaagatgaacggggctaagcgatctgccgaagttgtgggatgtaaaaatgaatcggtaggggagcattccgccttagagggaaggacccgcgcgag

SEQ ID NO: 349 - DNA, 2798 bp, Glycine max
cactgggacctccttgatccttgaatgtgttcaaaaactccatcatggatctgaaaagttgaattaagtagtataaaatagagacagctttattttatttttaagaattattctgtcaaggtgtcacacttatgaacatatattaattcctttatatgtccttgtgttttttttcctatctgctagttcctaacttgggaaagagcttttgcagcaaaagggtattgtccaaagcctttggttttcagtttgatagcttaaaaatggttcttttagatttctaatagcacatgtcatggatctggaacgtgcaattgttcaaaactctgataagaggaaagaatcatggaaaacggtgctaactctggcatatcagagtcttggagtagtgtatggagagattagcacttcaccactttacgtgtacagaaacacatttgctgaagacattggtcactcagagaccaatgaggagatttatggtgttttgtctttggttttctggactctcacattggtgcctttggttaagtatgtgttcatagtgctgaaagctgatgacaatggcgaaggtggcacgttcgcactgtactctttgctgtgccgccatgccagggttggcttgttgcctaattgtcaattggcagatgaggagctctcggagtacaggaggaacgactgcggcgtggcaccagagagaagccttgccttcaggctcaggtccttgttggagaggtacaaggtcttgcagaggattttgctggttcttgctttgttagggacttgcatggtgattggtgttggagtccttaaacctgctatttctgttttctcagctgtgtctggccttgagctttcaatgtccaaggagcatcacagatatgtagaagttccaggtgcatgcatcatattaataggcttgtttgctcttcaacgttatggcacacacagggttgggttcttgtttgctcccatagtttgtatatggctcttctgcatcagtgccattggtatatataatatcttttactggaaccctcatgtgtaccaagcactctctccatattatgttttccaatttttgaagaagactaggagaggaggttggatggccctttgtggaattttgctgtgcataacaggatcagaagccatgtttgctggtcttggacacttttcccagctatcactcaagattgctttcacgtctttggtttatccatcattaatcctagcgtatatggggcaagctgcgtatttttctagacatcatgatgttgagcaagagtaccactttggcttttatgtatctgtaccagagaagttgagatggcctgttctggtgatagcaatacttgctgcagttgtgggaagccaatccatcatcactggaactttctcaatcatcaggcaatgctctgcattaagttgcttccctagagtgaaagtagttcacacttcatccaaagttcatggacaagtatatatacctgagatcaactggttgttgatgctcttgtgtttggctgtaactattggcttcagagacacaaagcttatgggcaatgcatcaggtttggcagtagtctcagtgatgctggtgacctcatgtttgatgtcacttgttattgtaatctgctggcacaagaatgttatgcttgcaattgggtttgttctcttctttggcaccattgaggctctgttcttctcagcttctgtgatgaagttcttggaaggagcgtgggtgccggttgctttggcatttgtgtttttgtcagtcatgtgtgtgtggcactacggcactctcaagaagtatgaatttgatgtccaaaacaaggtttcactcagctggttactcagccttggccatactttaggctttgcaagagtacgaggaattggccttgtgcatactgagctagtgtctggaatccctgctattttctcccactttgtgaccaacctaccagcattccaccaagtcctggtcttcctatgcatcaagcatgttccagttccacatgttagacctgaggaaaggttcctagttggtcgcgtcggtccaagagaattcagagtctataggtgcatagtgaggtatggataccatgatgtccacaaagatgatgatgagtttgagaaagaccttgtatgcagcatagcaaagttcattcaagcaggaagtggatgcaataagaactcttcaaattcaaatgatgagcctgaaaagggaggtggcaaaatgacagttgttggaacatgttcttgtactatccaccacaccattttggttagtgagaataataattatgctcatgaggttgatcatgtggacttagctgagacatcatcagagtcacataaaattattaaaccaaagaaaaaggttaggtttgttgtgcctgagagtcctaagattgacaccggtgcaatggaggagttgaaggaattaatggaagccagggaaattggagtggcctacattataggacagtcctacatgagagccaaaccagggtccagcatgctgaagaagttggtcattaatttagggtatgaattcttaaggaagaatagtagagagccctcctatgaacttagtgctcctcatgcatcctctttggaggttgggatgatgtaccaagtttaattttggttaaacaatgtagagtaagtaatcatcatgtacatgttatcatcttgtatgcatagtcaaacccaaagagccatcaccacttaccaagtggatgtagggtaagtaattggtagtgtagaaatcttgtcatttgctcgttttc

SEQ ID NO: 350 - DNA, 1468 bp, Glycine max
ttcatatcacatggtgattaaaaaaaatgtatgagagatcctctcctatctataatattactcatcatttccattgacatttcacatactcatcaggacagattcaagggagatggatgatgaaattgaaaggttcatcaaagtatggatttcagcaatcttatgtctatgttattgttattacatagcttcaagaataccaaagggcttcttgagacttctctccctccttccaattctctacctcttcatcacccttcccttgaaactctcttcacccaccttagttggatacacttccttcttcatttcttggcttggcactttcaagctcttccttttctccttcaaccaaggccctcttgccctatcacccccaaacattgttcaattcatctccattgcttcccttcccatcacccccaaacaaaacccatcaaccaatgaaaaaaacaccaccaacaaacccaaatggcttttgttcctaaaagttcttatttttgtaatgatcttaggtgtttataactacaaagaaaccttgcatcctgatttcttgttagtcatttattgctgccacgtgtaccttgccttagagcttatgttagtccttgttggagccactgttcaaaccctttttggttttgagatagaacctcaattcaacgaaccctacctttgtacatctcttcaagacttttggggtcgtagatggaacctcacggttactcatattctacggcccaccgtatacgaccctatacgccgtatgtctacgagttttgtcggccccttgtgtgccacgtcagctgccatgttggccacgttccttgtgtccgggcttgtgcacgagttattatattattaccttacacgtgtgcctcccacgtgggaggttacgtgtttttttgtgcttcacggtgtgtgtatggtagtggaggtggctgtgaagaaggtggctctccgtcgtgggtggcagctgcaccgtgctgtgtcggggccgctcgtggtggcgcttttggcggtcaccgcgaattggctgttttttcctcaactgttgaggaatggtttggataggaagtccattgaggagtatgctattttggtggattttgttaagtcaaagttaccatttaagaatgtttaacttgctagggcgaacattgttaaaggatatgattgtgagccaaaagtaatgttcactctaaggactaaggatacttaaacattacgtatgtttaacgtgttagggtgcaaaggggctcattttttacttataaaaaataatataactattaaataagacatgttaattttggaaaacaatgagtgtgatcacccaataataaacatctgaagatgtgcaattcaaaagtctacaatcattgtgtgttttatgttatatgcatgtattggagtgtgaatgtgttataatatttctttgtcattcatatatatatatatatatata

SEQ ID NO: 351 - DNA, 5111 bp, Glycine max
tcagaccacttttgctctctctttgtttttttgttctgcttttgagagggttctttttttctaacatatactgatctctttagtttagatattcagatttcaggtcatcaataacaaactctacaatttgtctttcttcttcattctctctgactctcagacttctacaaccacgcacacattccctcactcgctggccacctttatgttaagccaacaagtcagttttcttgcttggtttttgtttcttttacagtaaggtatcataccatgttcttcctcttctctcactactactcttccatgatgcaccatggaactgattttctcctccaacctattttcacacgaggggtgtctgcttcactcaacctagttttgttacttgtgcttgttgtgtattgggtatggaagaaagtgcaagtggaccacagagaaaagagtgagagaaaaggattccgtaatgctggtttcttgtactacaaacacagtctggtttgtagcttagttatttgtgtgttcaaccttgtgttgtgcttactaagttacttttacttgtataacaattatggttcagaggagcttgtcacacttactgatttagctctcaaaaccattgtttggggtgctgtttgtgcttatttacattctagaaactccgaggcacaggatccgagtttaccacgtatgttgagaatttggtggtgggtctatgcctttgtttgttgttcttgccttgttattgacttcgtagtctatgcaaagcatattttcttgccagttatgtatcttgtttatgatataggctcctctattacgagtttatttctatgttatgttggatcacttggatgttctgttaacagtatggctaagcttgccccacttgaagagccccttttgaatggtgactctaatgtaagcaacaattctgttcccatcaaggctagaggaaatgaaaatttaacctggtattcaaatgctggatttttcagcattcttactttctcatggatcagtcctttaataactctagggaatgagaagactttagagcatgaggatctcccacatcttgctactgatgacagtgtggctgggattttcccaactcttagaaacaaacttgagtcagagtgtggtagtgttaggaatgtgaccactcttaagctcgtgaaggtgttattcttgtcaacttggcaaggaatccttttatcaggtttattagaattcctatattcatgtgcttcttatgttggaccctttcttattgacatccttgttcagtacctcaatggggaacacaagtttaaaaatgaaggttatgttttggctatggcatttgttgctgcaaagcttttggagtgtgtttcacaaaggcactgtatgtttaggttccagcaggttggggtaagcgtgcaatcaaagttggtggcaatgatttatgctaaaggtttgacactttcatgtcaatcaaaggaggttcgtagtactggggaaatcatcaacttgatgactgttgatgctgaaaggattggtgaattttgttggtacatgcatgatccatggatgtgtgttctgcaagttgctttggccttgttaattctctatagaagtgtaggggttgcttcaatagctgctcttgctgccactgtaactgtgatgttgctaaaccttcctttgtcatcattgcaagaaaagttccaaggcaaggtaatggagttcaaagataaaagaatgaaggctacgtctgagattctgaagaatatgaggattctaaaactgcaagcatgggagatgaagttcttgtcaaaggttattcagcttaggaagactgaggagatatggctacacaaatttctagctggtacagcaattattagatttctcttcactaacgccccaacttttattgctgtggttacattcggtgcttgtgttctcatgggaatcccacttgaatcagggaaggtcttatctgcacttgcaacattcagaattcttcaaatgcccatctacaatcttcctgacacgatttcaatgattacacaaactaaagtttcccttgataggattgcatcatttcttcgcctagatgagttgcagactgatgtaatagagaagattccttggggtagttctgataaggcaattgaattagtagatggaaatttctcttgggatttatcttcccctattacaacattgaaaaacatcaatctcaaagtttttcatggtatgagggttgctgtatgtggtactgttggatcaggcaagtctagtttactttcttgtataataggggaagtaccaaagatatcgggaacgcttaagatatgtggaacaaaggcttatgtttctcaatcgccatggatacagggaggcaagatagaagacaacatattatttggtaaagagatggaccgggaaaagtatgagaagattctagaagcatgttccttaacaaaagaccttgaggttctaccatttggtgatcagaccattattggagagaaggggatcaatttgagtggtggacagaaacaaagagtacaaatagcccgtgctctataccaagatgctgacatatatctgtttgatgatcccttcagtgctgttgatgctcatacaggatctcatctatttaaggaatgcttgctaggcattttaaaatcaaaaactgtgatatacataactcatcaagtagagttcttacctgatgctgatctaatattggtcatgagagatggaaggataacacagtcaggaaactacaatgatattctcaagacaggcactgattttatggcacttgtaggtgcacacagagcagctttgtcttcaattaagtccttagagagaaggccaacatttaaaacatcaagtaccaccaaggaggacacaaaatcattaagtaaaatatatgatcaaaagtcagatgacacaattgaggccaaaagacaacttgttcaagaagaaaaacgggaaaagggtagagttgggtttaatatttactggaaatacatcacaacagcttatggaggagctcttgtacccttcatattactttcacaaacactcaccgtgggttttcagattgcaagcaattgttggatgactgtggcaacacctgtttcagcaacagcagaacctgatattggaagctttacacttatggttgtctatgttgctttggctattggaagttccattttcacctttgccagagcatttcttgctgtgatagctggatacaagacagccactgttctcttcaataaaatgcatttgtgcatttttcaagcaccgatatcattttttgatgccaccccaagtggtcgaatccttaatagagcttcaacagaccaaagtgcactagatatgaaaattgctaatatattgtgggcaattaccctcaatctggttcaactcttgggaaatgttgttgtgatgtctcaagctgcatggcaggtgtttatagtattgattcctgtcacggcagcatgcatatggtaccagcgatactattctgcatcagctagagaattggcgcgattagttggtacatgccaagctccagttatacagcatttttctgaaacaatttctggatcaacaaccattagaagttttgagcaagaatcaagatttaatgacatcaatatgaaattgatagacagatattcccagcccaaattatacagtgcaactgcaatggcatggctgattttcagattggatattttatctactctcacttttgccttctgtttggttttcttgataacttttccaaattcaatgactgctcctggcattgcgggattggctgtgacatatggacttaatctaaatgctgtacaaactaaagcaatattgtttctttgcaatttggagaacaaaattatatctgttgaaagaatgctccagtacacaaccctcccaagtgaagctcctttcgtaataaaagacaaccaaccagattattcttggccattatttggagaggttcatatccgggatttacaggttcggtatgctcctcacttgcctattgttttgcgaggtcttacttgcacttttactgccggagcaaaaactggtattgtgggaagaacaggaagtggaaaatcaactcttgtgcaaacacttttcagacttattgaacctgttgctggagaaatattgatagataacattaacatctctttgattggaattcatgatttgcggtctagacttagcattattcctcaagaaccaacaatgtttgaagggactgtaagaaccaacctggatccactggaagagtacacggatgaacagatttgggaggctctagatatgtgccaacttggagatgaagtaaggagaaaagaagagaagcttgactccatagttatgcagaatggagaaaattggagtatgggccaaaggcaactggtctgccttggccgtgttctgcttaagaaaagcaagatcttggtgcttgatgaagctactgcatcagttgatacagccacagataatattattcagcaaacagttacgcaacatttttcagaatgtacagtcattaccattgctcataggataacttcaatccttgagagtgacatggttttgtttttaaatcaagggttgattgaggaatatgattcaccaaagaaactgcttaagaacaaatcttcatccctagctcaactagttgcagaatacacaaggaggtcaaactctggttttggaaattaaattgaaattagcctcaaatcagatgttcttcatgatgatacaaatttgctggtgtctagttagtaaggttggacacactatatgcagtgtaatgatacaagtagttatccttacagtgcatgtggcgtgtcctacctaccttactaatgtttttagtggttacactttatattaatctcaccgagacttgttgagactcactctgtcacgtactaatgctcacaaataatttatgcatactctgtgaattgtgattcggattattgcaatgtaaacgatctgagtgcaatcttagagccattcaataaactcatccaaactccatgttcatggaagtgaaaatatttgcctttggaaaa

SEQ ID NO: 352 - DNA, 1259 bp, Glycine max
gtgatttaagcatgtgattattatccttcatttagtcgcaacctagctagctttgaatctcgttcactaatccccaaaaatgccttgtctataccttagcagcccactacgtcatctcccgtgccctctgtgttgacgtcgcagcctgctccatcatttctggtaccgctccattgtcatcttgctttcactacttagtcgaagtgtataagtagtggttctcgagaagttgagccccaattttcccaaattagaactcgatcactttgtgaccaccacgtctataaatagattctctctacgaagcttattaacgcatcagaaaaagaaaagccttcaatcatatagcattctaagaaatgaagagccctaccattttcattctctttctactttctgccttctacacctcactcctaccttcagccaccgctcaagtcgtggttgacatggaaggtaatgatcttcaaaatggtgggaaatattatgtgttgccagtaatagagtcatcatatggtggaataagagtagccgcaactggaaaagaaagatgccctctcactgttgtacaatctgccgatccgtatgataaggggattgcaacaattatttcaaccccatatcgagttcctgttatccgcgaaggctttcctttgaacattacgttcggtaattttgcagttatactgccttgtgtcccccttcgttctgagtggaccgtcgttaatggccaaccagaaggacccgcagttaaaattggttcgcccccaaatgcagaaaatggttggtttgaaattgagaaattgttaacttcgggctataagcttgtgttctgtacgcggcctgagcgtagctattgtcaggatattgggattcatgtcgatgatgaaaatcacgcgcgtttggtgttgacaaatgatgatccactagtggttgagtttctgaaatatgatcccttctggccccagaataatctagtgcttcctacaagtcaatgagagactatataaatgctttggttgtaataaattattgtcagactaaataaaataatcaaagcttatcccttcatttgcaagtgttaattttggtgtgatgaaacaaaaatgactaaacacaacatcattggtgaaaatgttattttcgcttgtgggagtagcctagattcagctggtctactttgttatttctaattgaaatactaaatcaaaaggtttattatatcaggaactataatgttaccatttacatattctctg

SEQ ID NO: 353 - DNA, 1542 bp, Glycine max
atgctagacatcaaaggctacctcgtactcttcttcctatggttcatatcaaccattctgatacgttccatcttcaagaaaccacagcgtctaagactcccaccgggtcctccaatttcaatacccttgctgggacacgcgccatatctccgttcactgctccaccaagcattgtacaagctatcactgcgctatggacccttgatccacgtcatgatcggttcgaagcacgtggtggtggcgtcgtcggcggagacggccaagcagatcctcaaaacctcggaggaggcattctgcaaccgtcccttaatgatagcgagcgagagcctaacctacggcgcggcggactacttcttcatcccctacggcacatactggcggttcctgaagaagctctgcatgacggagcttctgagcgggaagaccctggagcatttcgtgagaatccgcgagagcgaggtggaggcgttcctcaagagaatgatggagatttcaggcaatggaaattacgaggtggtgatgaggaaggagctcataacgcacacgaataacatcatcacgaggatgataatggggaagaagagtaatgcggaaaacgatgaggtggccaggttgaggaaggtggtgagggaggtcggggagttgcttggggcgtttaacttgggggatgttattgggttcatgaggcctttggatctgcaagggtttgggaagaagaacatggaaactcaccacaaggtggatgcgatgatggagaaggtgttgagggagcatgaggaggctagggctaaggaagatgctgactctgataggaagaaggatctttttgatattttgttgaacctcattgaagctgatggtgctgacaataagctcactagagagagtgccaaagcctttgctctggacatgttcatcgccggcacaaacggccccgcaagcgtcctagagtggtcactggcggagctggtgagaaacccccacgttttcaagaaggcaagagaagagattgagtcagtggtaggcaaagaaaggctggtcaaagaatcagacattcccaacctaccatacctacaagcagtgctgaaggaaaccctaaggctgcacccgccaaccccaatattcgcaagagaagccatgcgaacatgccaggttgaaggctacgacattccggaaaattccactattttgatcagcacatgggccattggtagggatccaaattactgggatgacgcactcgagtacaagccggagaggttcttgttctccgacgacccgggcaagagcaagattgacgtgagggggcagtactatcagctcctgccctttgggagcgggagaagaagctgccccggagcctcgctagcgttgcttgtcatgcaagcaacgctagcgagtttgatccagtgcttcgactggatcgttaatgatggtaaaaaccatcatgttgacatgtctgaggaagggagggtgactgtgtttttggccaagccactcaagtgcaagcctgttccgcgtttcactccgttcgctgcctga

SEQ ID NO: 354 - DNA, 1785 bp, Glycine max
ctttggtccatattcatgcatgcctccatgtgaatcattagtttgaatgtcaatatttgacatatgaggccgagcctgatgatagcgtgttccctctaagagatatgtttagaacttgtctgagtgtagttgctgctctgactaaggattgcattgagggatttcatttgcaggaggttaaaagtttcaaccaacgcaggctaatacacacaaagcttgcattttctcttgaacaaattatatccatttctacactagctcttgaaagtaaatatgccaaagattgtgaagcaaggaactccatctgtgttggtgcagtgagatattgcattcaatgttttcatactgtacttagtgattcaaatatgcaggttcaagtaataggattgcaatttcttaaagccaggattcaaagaggtgtaaatacagaagataactcttttataatgtttcttgttggggagctaattgctgatattttcactttgatccaaaaaatgttgaagaataccataacaagagaatctgtaaccattgctagtgaatgcttgagtctcctggtgctgttacaaaccttgtcaaaaggtgatgactgccagagaagctttatgaacctacttctggaggccattgtcatgattttcttgtcaacagaagacgggatctctcaggaagtcaataatttaagaagcacaactgttaaacttgtttctcgccttgctcaaattccttcatcagccattcatgtcaaggatgttttactatcaatgcctcctcttcaccgccagcaacttcagggtgtaatacgagcttctgtaactcatgataaaaatccaacagatataaaagtaccagttttggacataaaaatgccaaagccatcggaaggaactgaagagaaacataccataccatcatctgctgctgtgatgcagacagatgaaaatgacaaggaagaagatgagtttagtgaagatgattgggatgcatttcagtcgtttcctgtctctaaaagtgaggatgaagatgattcaaaaacagagcatgttgctgaaggcaaggatcctagcacagttaaaatgtcatcagaaatagaaagttctattggaggtgttgagtttcaagatttttttatttccaaatccatcaatagtgaaaaggagctgaaaggtgatgaatgtctggaggctgtcaaagagaaacatgatcaaacttatcctagtactaacaagccacatgataatgagaatcaagagatggagggaaaattgcaaacctcggtggctcgagaaaaggggacatcaatcccaggaagtgaactagtttcttgtgatcagaagcctgaggtagaggctaagatggaggaaaatttgcaaaactcggggcttcaaggagagggggcatcaataccaggaaatgaacgagtttcttgtgatcaaaagcctgaggtagaagccgaggtggaggaaaaaaatgcaaaactctgggcttcatgaagaggaggcatcaatccccggaaatgaacgagtttcttgtgatcaaaagcctgaggtagaagctgagatggagaaaaaattgcaaaattcagggcttcaagaagaggggacatcaatcccaggaaatgaactaatttcttgtgatcagaaacgtgaggtagaagctgaaggatcaattgaagaggaagtagtgtcagattctctgacacttcaacagggggtttctgaacagcctaacaggtgtgatgaagatgctgagaaggacagtgttaatgaaaatgagagtcat

SEQ ID NO: 355 - DNA, 345 bp, Glycine max
atgagtgccatgaaattttgccgtgaatgcaataacattctgtaccctaaggaagacagagaccagaaagttcttctcttcgcttgccgcaactgcgaccatcaggaggttgctgataacttctgtgtgtataggaatgagatacatcactctgttggagagcgcactcaggtgttgcaggatgtcgctgcagatccaacgcttcctcgaaccaagtctgttcgctgcagtcaatgcaatcatggtgaagctgtctttttccaggcaactgccagaggggaagaaggaatgacactttttttcgtttgctgcaacccaaactgtggacacagatggagagactga

SEQ ID NO: 356 - DNA, 1829 bp, Glycine max
ttgaaacagaaagttgatagacaaaagggtttttttctataagtagttgggtccttcctccattcaccatttccctccaatccctaattcccaaaattcacagacaccaaccaaccatgttcactcaaattcttagatagttacttagttagctctttccgccatggaaggtaacaaggacgaagcattacgctgcgttcgcatcgccgaagaagccatcgcgtcgagaaacaaagaccgcgccctcaaattcctcaaaatcgcgcaacgtctcaaccgcgatttgcccctccaatccctgctcgacaagtgcaaccgcctcgattctcacaccgcctccaccgcaggcggcagcggcgcctctctggcgaacggccactctcctcgtcgcgagggcttagacgtggaaagaaattacacggacgtgcacttaattagggaaatcaaaggaaagagcgattattacgcgattctaggattagagaagagttgctccgtggaagagattcgaaaagcgtatcggaagctctctctcaaagttcatcccgataagaacaaagctccaggctccgaagacgcgttcaagaaggtttccaaggctttcaagtgtttgagcgacgacggttccagaaggatgtacgaccaaaccggaaccgccgccgacgatttcgagagcaccgaggtaaacacgttccggcgtagaagaagaagaacggcgacgacgcgcgatttcttcgaagacgagttcgatccggacgagatattcagggcgttcttcggacactccgacgtgttcggaagaaacaaccacgtttaccgaacccgcggcgggatggggaatccgaatcatcagcataggcatgaattcaatgctggaggatcgggagggaggcatcacaatgtgatgcttctgattcagctcttgccgtttttgattattgtgctgctcgcgtacttgccgttttcggagcctgagtattccttgcacaagcattacagctaccagattccgaagaccacggatcggcacggggttcagttcttcgtgaagtcggcggcgtttgatgtgaattatccgcccgggagtgatgctcgtgaggcagttgaggagagtgtgatgaaggattataggagtatgctgagaagatactgtcaggtggagatgcagagacggagctggaataggaatctgccagctcctcactgtgataagctgcataactttgcagtgatggcatgaaggtttgtgaattttcctttcctgtctggtaagagtactacttggattggtgattaaatgttggactccggtgacaccattttacggcatcatatgaaaacaagaatgaattcacttggctgatgagtattgaaccatagaggtcatgagatggaaaatatttggatctcggtcctcactgtctctgcttgttttcctggatacatcgtacagatcaatgataagcacctagtttattattaaaagcacatgcacacggatattgtttggaggcggattgtcagttggtacagcatcttttgtggatcttcggtgtgaagaagattctctttgcctcttgttgatgtttttgcataatcttgactgaagcataactacttagcactatactagtaagtagtaagcaaaaaatttcaaagtcatagacccaaaggcaggctggtataaccgctagtgtgatcaaacaaaaatcgtccaatgatgttatagtaaagatgattttttcatgtattgagtgttatttacgagattagtattatatatatatatatttaccatcatattattacaaaatagttttcatcggaaa

SEQ ID NO: 357 - DNA, 2428 bp, Glycine max
ctccggtttacatgcattgcaacatcattataaaaaagcgtgtgtttgagtaataccctggaatgtgcaatacatcccaaagccatagagatcaattaagtggaggaggaaaagttgccgtcaaaagttctacttgcaggttccacagttgtgaatttgatgaataatatcatcactgaagggcattctatttcgaggccaccatatttcgatggaagaaattacatcgagtggaaggagcgtatgaaaatattcatacaatccgttgacttcaagctatggcttctgataaaaaatggaccaaaagttccaacaaagctagtagacaatgaagaagtggagaaaagtgaagatgaatatgatgaagaagacatgaagaatttggaattagaggccaaagcaaaaaatattttacattgtgccttgaatccagatgattttgaaatattttcagagggtccaaaaacatccaagcaaatgtgggacgagcttgacagggttttccacagggaaaggactggtgacaactcatcaactccacaaggacaactctccagcgatccaacggcaccagatacaagtcaatttagctctcctgatctttactttttacaggaaacaagggaatccatgaacaaatttctggagctttgtgtgccccttcacaagcttgctctagaaggcaattggcaagcagccaaagtcatcttaggaaaagatagtagactgaagcacgcagcaatagcagatggttgggctacacttctgcatgttgctgtaggtgctaaccatgcttcctttgtgaaggagctgctgcaagaattcgacaacgatcaatacatctcgttgcaagattaccggggcaacactgccttctgcttcgctgttgcatctggaaacatggaaattgttgaattattgaagggaagagatccacacttgccaacaagaaggggtggaagtgattatatccctattcagtttgctgcgatgcaaggaaattgcgacatgacacgctatctatacgacatcagcaaagaagcgttcgaggatacggacaagataatgttgttctttacttttatcaagaccggcaactatcacatggccttaaaaatggcagatgagtgggtagagctagcttatgcacgagatgataataacgagacagctttgcatctcttggctgtaaatcaaaaccctttggattcgtgttgtcattgtccagagatggaaggttccttccggatcaaccctgacacgaaacatgtgatgtttcaattggttaattttctctggaaaaaaattctccagcacaaagaccattcggaggcaatgagaatcataagtgagccttctcaactattatacgatgctgcagaagttggtaattttggattcttgtcagagcttattagtgcttaccctggcaagatcatatgggaagtggacaacaatgggcaaagtataattcacacagcagtttcatatcgccatgctagcatcttcaatctcgtacatgaaatagggttcattaaggatattctaatatcatatattgtcaaagaaaacaacactttattgcatttggctgcaaagttagccccaccagatcgacttgcaatagtttctggagctgcattccaaatgtgcctcgagatcatatggtttgaggaggtgaagaagataatgccaccatcgttcataaatttgaaaaactctgatggtctaactgctcaacaattattcataaaggagcatgaaggattgcggggaaaaggagaggaatggatgaaacgcactgctgagttttgtatgcttatatcaaccgttattgccacagcgatttttgctgcggcaattaacataccaggtggtattgatgatgacacaaaaaaaccaaattatttgaacaaagcatcattccaagtatttgcaatagcagatgcagctgcattcatcttctcagcaactgcaattttgatattcttgtctattctcatctcgcgatatgcggtgtacgactttcacaagtcactgcccttgaagttaatatttggactgataactctgttcatctccatagcatgcatgatggttgcatttggaagttccttcttcataacctactactatggtttgaaggtgcttcctgattcagttgcagtactttcgtgtctaccattgcttctatatgtaggtttgcaattttcattatggtcagatatcatctactcaacattctattgtaggaatctattcaagccaagtaaacgtatgatttacctatccactacagaactagaggaggcatataatcagaccatattttgatttgttgaagttgtaatatattatcctcgttacaaggtccaatgcaagttaaaagtgtaacttggactgtttaattttataaggtttaatctaa

SEQ ID NO: 358 - DNA, 1755 bp, Glycine max
aatggaggtgtagttctatttatgatggttatggttcttggattgatattgataggtattctcatttggtgctcagtgcccaaatgcataaattggttggacggtattcagaaatcatcatctagacagacaccagacacaaaatttatgacactcgctgtggataagtttctgaatgacatggaaagagagaagctaatcaggttcactgatcaacagctaaggattgcaactgataattactcttctctgttgggatctggaggattcggaaaagtttatagaggaagtttgagtaatggaaccatgattgctgtgaaggttctacgtgagagttctgacaagagaattgatgaacagtttatggcagaagtgggtacccttggtaaagttcatcacttcaatctagttcatctgcatggattttgctttgaagcaaacttgagagctctggtttacgagtacatggtgaatggcgcgcttgaaaaatacctgtttcatgaaagcatgaccttatcatttgaaaagcttcatgagatcgcagttggcacagcgagaggcatcgcttacttgcatgaagaatgccaacagagaataatccactatgacattaaaccaggaaatattctcttggacaggaatttcaatcctaaagttgctgattttggtttagccaagctttgtaaccgggaaattacacatctaaccttgaccaagagtagggggactcctggttatgctgcacctgaactttggatgcctaattttcctgtgactcacaagtgtgatgtttacagctttggaatgctgttatttgaaatcataggcaggagaagaaaccttgacgttgaacttgttgaaagccaggagtggtttccagtgtgggtttggaaaagatttgaggctggagaatttgaggagttgataatagcatgtgggatagaagagaaaaatggggagatagcagagagaatggttaatgtagctctattgtgtgttcagtacaggccagatttaaggcctataatgagggatgtggtgaaaatgttggaaggttctgttgaagttccaaaacctgtgattccgtttccacacttgattgatttgacttccaccactggtccggttcaagcatcacaaaccaatactgatgcaggtattggttcttactcttcagcaatgacaaccaaatctgtcaatgtacttggcactcctactacgaccaagtatgagattaaattagcctctgtgtagaatttattcaatgattcctaaaagatccaccaatacaaattggtgacaaaatggtaacgttgtttttcttttctttttcatttggcttcttacatgatgattgtaaatacttataaagtgcgtgtgtcacagaaagaagagaaaaagtgcatgtgtcacagaaaaaagtgcatgtgtcacaaaaaaagtggtaacgttgcaaaaaggaacaattgctccaggttgtgcaatagtgtggctagagaatattaagtgcatgtgtcacagaaagaagagaaaaagtgtgtaatagaggggacattagtgggtatgtgaatgaggaaagatgaaagagaaggcaagaatctttgaactaagtttagtcgagagatattgttgtagtgtgtgagaactgtacatctaatcaaagcagttattgtgttgttacattgagcaagttattatctttatgtatatggtaatattttctgctttacgacattagtctttgtccaagttgaa

SEQ ID NO: 359 - DNA, 1439 bp, Glycine max
tttttagaactctatctaacataatactagagccagtcttttataatattagagcatctagctcaaatagcatggcttccaatctgattagagtgagcacaagcttggttctagtagttttagtagctctcacagttcaaattttctacatttcacccatagatccagttttgctggatataaaacctgctccttcaaccaaagacaatcaattacagaatatcattaagcttggagaaggacttttgaaggaaccagaagatgttgttgtagataaagaagggactctctatacagctactcgagatggttggattaaaagattgcgcaggaataatggaaaatgggagaattggaagcatatagatagtcatactttgctaggaatcgcaacagcaaaagaaggtggtctcattgtttgtgatacttccaagggtttgctcaaggttacagaagaagatggttttagtgttcttgtttcacacgtaaatggttctcagttaaggtttgcagacgatgtgatagaaggctcaaacgggaatgtatattttagtgttgttagtacaaaatttgatcttcaagattggtatttggatgtgttagaggcaagacctcgtggacaagttctcaagtacaatcccacatcaaatgagactgttattgttcttgataatgttgcatttgccaacggcgttgcactctctaaggacgaagattatcttgtggtttgtgaaacttggaaatacaggtgtttgaggcattggttagaaggagcaaacaaaggcacaacagatattttcattgaaaaccttcctggtgcacctgataatatcaatcttgctcccgatggatccttctggatcgctttgattcagttgacttctgaaggatttgagtttgtccacaactacaagataactaagcacttggttgcatcgtttccaaggctaattaaccttgtcaatggctgcaagaagaaagcaacggtggtgaatgtggcaactaatggcaggataataagaaagcttgatgatagtgatgggaaggtgattaattttgtgacttcagctgtggagtttgaggaccacctttaccttggtagtcttaattccaactttgttggaaaattaccattgtatagtgcatagaatagtcaagtttagccctccttgaataaaggtgtgcctcagcttggatcaagcgaaagaagcatcccatgatggatatgtatgatttagaccaagcacatgtaggagaatattgttccataatgcatattctctgttcacattttgttagtactagaactagtattctgtttttgactgaaaaaaaaataaaggaaaaattgagtggtaaaaaaatatgaagaccatcaatcggatagcaccattgcctagtgtagtacctctaagagtgttgctaggtgcacccagcat

SEQ ID NO: 360 - DNA, 645 bp, Glycine max
atggtgaagccgaagagcgtggagaaacccgcagaggaacaacaacaacgaagtgtttcatcgtacagaggagtacggaagaggaagtgggggaagtacgtgtcggaaattaggttacccaacagccgtcaaaggatttggttgggttcctatgacagcgccgagaaggcggcacgcgcgttcgacgctgccatgttctgcttacgtggcagcggcgccaaatttaatttcccgagtgacccacccaacatcgccggcggggggaacatgacctcctcccagattcagatcgcggcggcgcgtttcgccaattcggagccccgaaatgagcgttcggatcaacccgtggagtctttaacttcggatgaggaaacggcatcgtttccggtcatttcggatacggatacatcatctcctcctctctcagacgtgacgttccaaaacgacgccgaattagttactgggtcgttccctgatatgttttcggatttcgggtcgggcgattttgtgcccgatttctccgattttccgagcttcgacgatttcagccgggacttcttcttgcatgaacttccgggtttcaatttcggagaagagaacttggatggattgataattcaggactcgttcttgtggaatttctaa

SEQ ID NO: 361 - DNA, 1243 bp, Glycine max
gaaaacgcagccaaaacagcaacaaacgacagagattcttcctcaacacaatcgaaaaaaaaaaagcttccgattctaaaaccagaacaacaaaaaagtaaaacacacacgtcattttaaaacatttcatttttttggttatttatttaaagagcgagtgttgtaacaaatggtgaagccgaagagcgtggagaaacccgcagaggaacaacaacaacgaagtgtttcatcgtacagaggagtacggaagaggaagtgggggaagtacgtgtcggaaattaggttacccaacagccgtcaaaggatttggttgggttcctatgacagcgccgagaaggcggcacgcgcgttcgacgctgccatgttctgcttacgtggcagcggcgccaaatttaatttcccgagtgacccacccaacatcgccggcggggggaacatgacctcctcccagattcagatcgcggcggcgcgtttcgccaattcggagccccgaaatgagcgttcggatcaacccgtggagtctttaacttcggatgaggaaacggcatcgtttccggtcatttcggatacggatacatcatctcctcctctctcagacgtgacgttccaaaacgacgccgaattagttactgggtcgttccctgatatgttttcggatttcgggtcgggcgattttgtgcccgatttctccgattttccgagcttcgacgatttcagccgggacttcttcttgcatgaacttccgggtttcaatttcggagaagagaacttggatggattgataattcaggactcgttcttgtggaatttctaagcgggtcagggttcggataattttattatatccgaacccgatatcagaatccggatcggatccgggtttgggttgggtcaaattttgcgtgccaagccctccatgtgttagtagttagtgatgattatagttttttttttttaacgtaccaagtagtcaaatgtttcgattttttgggatgcgaatcataattcatttatttgtcatgacttatgtgattaattgtaaagtcgtctgctgaatgatagtgtaatttttttggccattcgttcaattataaaaggataagatattttcgtctggatatattgattagtggtggcttggtttggcccattatattaatttatgtctatctactacgattgagacgggacatgtgatgatcaaagatacggaaagaaactcaattggaaagaactttatcac

SEQ ID NO: 362 - DNA, 2433 bp, Glycine max
atggcaaatcatcctttgacacactctcactctttccgcgagaggtttgatgaaactctcactggtcacaggaacgaaattttggcccttctgtcaaggcttgaagccaagggcaagggaatcctgcaacatcaccaagtggttgcagagtttgaagaaatccctgaggagagcagaaagaaactccaagatggtgtctttggagaagttttgagatccacacaggaagccatagtgctgccaccatttgtagctcttgctgttcgaccaaggcctggtgtatgggaatatctgcgtgtgaatgtgcacatgcttgttgttgatgagcttcgtcctgctgagtatctgcgtttcaaggaggagcttgttgagggaagttcaaacggcaactttgtgcttgagttggactttgaaccgtttaatgcatccttccctcgcccaactctgaacaagtccattggaaatggcgtcgagttcctcaaccgccacctttcggccaagctcttccatgacaaggagagcatgcagccactgcttgagttcctcaggcttcacagttataagggaaagaccatgatgttgaatgacaaagttcaaagcctggattctctccaacatgttttgagaaaagcagaagagtatctgatttcagttgctcctgaaacaccctactcggaattcgagaacagattccgggagattggtctggagagggggtggggtgacactgccgagcgtgtcctcgagatgatccagcttctcctggaccttcttgaggcacctgacccttgcaccctcgagacattccttggaagagtccctatggtcttcaatgttgttatcctttctccccatggttactttgcccaagataatgtcttgggataccctgacactggtggacaggttgtttacatcttggatcaagttcgtgccttggagaatgagatgctcaaccgcatcaagaaacaaggccttgatatcacccctcgtattctcattatcactcgtcttctccctgatgcagtaggaactacctgtggccaacgtctagagagggtatatgatactgaatattgtgacattctcagagttcctttcagaacagaaaagggaattgttcgcaaatggatctcaagattcgaagtctggccatacctagagacttacactgaggatgtcgcccttgaacttgccaaggagttgcaagccaagccagatctgattgttggaaactacagtgatggaaacattgttgcctctttgttagcacataaattaggagtaactcagtgtaccattgctcatgctctagaaaagaccaagtaccctgagtctgacatttactggaaaaaatttgaagagaaatatcatttctcatgccaatttactgctgatctttttgcaatgaaccacacagactttatcatcaccagcaccttccaagagattgctggaagcaaggacactgttggacagtatgagagtcacactgccttcacccttccaggactttaccgtgttgttcacggtattgatccatttgatccaaagttcaacattgtctctcccggtgcagacatgggtatatacttcccatacactgaaactgagcgtaggttaacagaattccactctgacattgaagagcttctttacagctcagtggagaatgaggaacacatatgcgtattgaaggaccgcaacaaaccaataatcttcaccatggcaaggcttgaccgtgtgaagaacatcacggggcttgtcgagtggtacgggaagaacgcacgcctccgcgagttggtgaacctggtggtggtggctggagacaggaggaaggagtcgaaggacttggaagagaaggccgagatgaagaagatgtatggcctcatcgagacctacaagttgaacggccaattcagatggatatcctctcagatgaaccgtgtgaggaacggagagctctaccgtgtcatctgtgacacaaggggtgcctttgtgcagcctgcagtttatgaggcctttgggttgactgtggttgaggccatgacttgtgggttgccaacgtttgccacatgcaatggtggtcctgctgagatcattgtgcatggaaaatctggttaccacattgatccttaccatggtgaccatgctgctgagatccttgttgagttctttgagaagagcaaggctgatccatctcactgggacaaaatctcccagggtggactcaagcgtattcatgagaagtacacatggcaaatttactcggacaggctcttgacactcactggtgtgtatggcttctggaagcacgtgaccaatcttgaacgccgtgagagcaaacgttacctcgagatgttctatgctctcaagtaccgcaaattggtatatttctttcattattacactattcaatggcttcatttatga

SEQ ID NO: 363 - DNA, 1167 bp, Glycine max
atgcagagccgtatcctctgcttctcaacgcgtcgtttaccactccatcagcgtcgttttctcagccacttcattcccgaccaccaatacgacccgccgttctccccttccccaaaaccctactacaaatcaaagaagaaccacgcggagaagaagaaaaagaacaattccgaaaacggtgatccgaacaaaaacggagccccgaaacttcctttcaagtcgaaccttccgttcgacttcagatactcttattcggagtccgacccttccgttgggcccatcagcttccgcgaatcgcccaagttctccccctttgggccgggccggatcgaccggaaatggaccggtgtttccgctccggttcagggtgaaccggaccgggagagggtcgaggaggagcggaaccggattctcggagaaccgcttagtgaggtggaggtggcagagctcatcgaacgctaccggcacagtgactgtgccaggcaaatcaatttagggaaggggggagtcacacacaacatgttgggtgacatccataaccattggaaaaaggctgaagttgtgaggattaaatgcttgggtgtgccaactcttgacatggacaatgtttgcttccacctcgaggacaagtctggtgggaaagttatctaccgcaacattaatatactgcttctgtacagaggacgaaattatgataccaagaactgtccagttatccctctcatgctgtggaagccttatgcacccatatatcctaggcttgtgaagaatgtaattgagggtttgacgtatgaggaaacaaaagaaatgagaaaaagtgggttgaattcagatcctctcctgaaactcactagaaatggtgtttatgtgaatgtggtggagagggtgagggaggcttttaagactcaggaggttgtgaaactggactgtatccatgtgggaactagtgactgcaaaaagattggagtgaagctaagggatttagtgccatgtgtccctatcttgtttaaggatgagcagataatcctctggagaggaaatttcaaggaagagcaaccttcagattcacaatgcgagaaatgcattgattcatggctgaaactcctcaatcagcttgtttgtagcgtgtttaaaagcctgttgagaagtaaaagatcatgtttatga

SEQ ID NO: 364 - DNA, 1074 bp, Glycine max
ttccacacacgagatcactactcaatggaggaccaactcgaactgaaccctaactcggtcaccagactcagtgagtcctcggcgccgtccgacgacgacgaaccggctctgagctcccacacccttgccgccctcaaagaattcctggccgagcagcagcagcgcggctccgatgccgccggagagtccgaggtttctctagtgtccgaggattggaggctgagccagttctggtacagccccgaaaccgccacaaccgtcgccgaagaagttctcgctctgtgcggcggcgccgtccacgctcgcgtcgcctgcatcgcttgccctactctctatgcttatctcaagaaaatggatcctaatgtgtctatgcaacttctggagtatgacaaacgttttgggcaatatggaagtgagtacacattttatgactacaatcaccctgaggatattccatcagaattgaagcattcctgcaaagttgttgttgcagatcctccttacttgagcaaagagtgcttagagaaagttgctgaaacaattcatctgctcgtacaacctggagagtcatttttgcttctactaacaggtgaagtgcagaaagaaacggcagcagagatcttgggcttgcatccttgtggttttaggcctcaacactctagcaaacttggaaatgagtttcggctgttctctaactatgaccctggtacaagactaggagggtgggaaaaatagtgattggatgtgatcatgtctgccgttaagacgacgttgaagtaaacatttctgtggaattaatatttgcctctaggcaacaagtgtgattttgacattggtcgttggagatattgtcgacttgtctccatttctagtaacagggacatttttgggttgtatttgattattacgaggaaatgcgtttcaatggaccgattaaatttgtctttttgatatttgaaacttgaggttaatctttgacccaccattatttcaagattattgtgaatgatagatagtttgtactactaagggcaattttgatatagactctaatcgtgcggttcagcaatgata

SEQ ID NO: 365 - DNA, 1161 bp, Glycine max
atgggaggtggtggtcgaagctcagctactctcaagcatcaaaactcaattaaaaaccattcaaagaagaagcgtgtcccacatgcaaagccacccttcactctaagccaactgaagaaggcaatttcaccacattgcttccaccgttcaacattccgttcattctcctacgtcctctatgacctaaccatagcctcatgcctcttctatgccgcagtaaattacatccctacccttccccatgaaaacctctccctcctagcatggcctctctattggttcatccaaggttccatcctaaccggggtttgggtcatcgcacacgaatgcggccaccacgcctttagcgatcaccaatggctcgatgaccttgttggcctaatcctccactcacttctcctagtgccctatttttcatggaaatatagccaccgccgccaccactcgaacacaggatcactcgaacgtgatgaagtgtttgtgccaaaaacaaagtctagtatgggttggtattctaaataccttaacaactcaccagggagggttctcacacttgctataaccctaaccctaggttggcctctttatttagctttcaatgtttcgggtaggtcttatgagagatttgcatgtcactatgacccttatggccccatttactcaaaccgtgaaaggcttcagatttatgtgtccgatgctgggattcttgcggtgtgttttggtctctacaaggctgtcttggcaaaagggcttgtttgggttgtttgtgtttatggggtgcctttgttggtggttaatgggttcttggtgttgatcactttcttgcaacacactcaccctgcggttcctcactatgattcctccgagtgggattggttgagaggtgctttggccactgtggatagagattatgggattttgaataaggttttgcataacatcactgacacacacgtggcacatcacttgttttccacaatgccgcattatcatgcaatggaggctactaaggctataaaaccaattttgggagagtattatcactttgatgagactcctatttataaggcaatgtggagagaggcaaaggagtgcatgtatgttgagcctgataaagggtctaatgggaaaggtgtttattggtacaataataagttgtaa

SEQ ID NO: 366 - DNA, 1665 bp, Glycine max
aaaggctgcgagaaaataacaggaacgaacgatgatattatcggcaaagaaagagagaaaaatgtcctcatcagcaaaaataataataataataataataaataaaagaatatgatgggtaacccttcactcgagggaaaccttcatttcgtggagagaagtaatatagcataaatactctttatcttccctcatctccttacaaattcttcgtctgcatcttctctccttcagatacagagggagaaagatacaaaaccttttcactcgtccttcttcttcaggttgcgcgataaaatgggaggtggtggtcgaagctcagctactctcaagcatcaaaactcaattaaaaaccattcaaagaagaagcgtgtcccacatgcaaagccacccttcactctaagccaactgaagaaggcaatttcaccacattgcttccaccgttcaacattccgttcattctcctacgtcctctatgacctaaccatagcctcatgcctcttctatgccgcagtaaattacatccctacccttccccatgaaaacctctccctcctagcatggcctctctattggttcatccaaggttccatcctaaccggggtttgggtcatcgcacacgaatgcggccaccacgcctttagcgatcaccaatggctcgatgaccttgttggcctaatcctccactcacttctcctagtgccctatttttcatggaaatatagccaccgccgccaccactcgaacacaggatcactcgaacgtgatgaagtgtttgtgccaaaaacaaagtctagtatgggttggtattctaaataccttaacaactcaccagggagggttctcacacttgctataaccctaaccctaggttggcctctttatttagctttcaatgtttcgggtaggtcttatgagagatttgcatgtcactatgacccttatggccccatttactcaaaccgtgaaaggcttcagatttatgtgtccgatgctgggattcttgcggtgtgttttggtctctacaaggctgtcttggcaaaagggcttgtttgggttgtttgtgtttatggggtgcctttgttggtggttaatgggttcttggtgttgatcactttcttgcaacacactcaccctgcggttcctcactatgattcctccgagtgggattggttgagaggtgctttggccactgtggatagagattatgggattttgaataaggttttgcataacatcactgacacacacgtggcacatcacttgttttccacaatgccgcattatcatgcaatggaggctactaaggctataaaaccaattttgggagagtattatcactttgatgagactcctatttataaggcaatgtggagagaggcaaaggagtgcatgtatgttgagcctgataaagggtctaatgggaaaggtgtttattggtacaataataagttgtaaacattagagctattgagtattggttgagactcgagagtttagagtttaggtttgttatgtacgaatctctaatgttccttatgggtcttataaaataatttcataatcagtggtagaaaaggagaatgtaatgagtgtatgcctatgttgttatgcatatggtgggttgaaatcagtttatggctttcacttaatggttgggaagct

SEQ ID NO: 367 - DNA, 1038 bp, Glycine max
atgggcgaacaaccaaacccttggaacatactacagcctcaggtggcgaagagccgacatcgaggtgccaaaccttcccatccatgtgagatcttagggaagatcagaaacctttgcacgcctccgttacctttagggaggcttacgccccatagaaactatctacctgagactatccctcggctcgtaggtcctggaacaaggaaaagcccaaagccaatcccaggaaatagtgaagcttcatatggtctttctgtccaagtgcaggtagtccgcatcttcacaaacatgtctatttcaccgagtctctctccgaggcagtgcccaaatcattatgcctttcatgcggacgttatagttacggtcgccgttcaccgaggcttcggtcatcggatcccctgtcatctggtcactaacttccttgaccttccggcacttggcaggtgtcagcccccatacatggtcttacgactttgcggagacatgtgtttttgcctcctccatccctcgagtccaataaagggtagtacaagaatattcaccttttgtccatcgactacgcccttcggccggatcttaggccttgactcaccctccgtggatgaaccttacgaaggaacccttgggttttcgaggcattggattcttaccaacgtttatggtacactcccctaccgattcatttttacaccccacagctttggcagatcgcttagccccgttcatcttcggcacaagagcgctcgatcagtgagctattatgcattctttcaagggtggctgcttctaggaaaacctcctggttgtctctgcacccctacctcctttatcactgagcggtcatttaggggccttagctgtattagagtttgcctcgatttggtaccgctctcatggcccgcaccgaaacagtgttttacccctagatgtctagtaaactactgcacctcaacggattttagggagaaccagctagctctgggttcgagtggcatttcacccctaaccacaacttatccactgattcttcaacattag

SEQ ID NO: 368 - DNA, 1236 bp, Glycine max
cgcgattttgcaaagcaggattttaaagtgagaataatgtgatactcacacccaattccgatgtgtgagctttactttggacaaagataagagaaaaaaaaatgtggtggttgggaagaaaagggccttctggattctcagcttcctctactgctgaggaagttactcagggaattgatggctctgacctcactgccattgttacaggggcaacaagtggtattggtgttgaaactgcacgtgcacttgcattgcgtggtgtccatgttgtcatggggatcagaaatatgacagctggtggggagatcaaggaaacaatattaagatataacccgattgcaaaaattgacatgatggagctggacctaagttcaatggaatcagtgaggacatttgcatcgcaattcaattctcgcggtcttcctctgaatatacttgttaataatgcaggaatcatggcaacaccattcaagctttcaaaagacaaaatagaattacagtttgcaacaaaccacataggtcatttccttttgacaaacttattgcttgaaacaatgaaacggactgctattgaacagaggaaggagggaagggttgtaaatgtctcatcaagacgtcataaattatcatatcctgaagggattagatttgataaaatcaatgataaatcagggtataacagtttgtctgcatatgggcagtcaaagcttgctaatgtgttgcataccaatgagctcgcaagacggctaaagcaggaggagggcacaaacataactgcaaactcagttagcccgggaccaattgccaccaatctatttcgttatcacagtttaatggaggtgtttgttggtatacttggtaaatatgcgatgaaaaatatacagcagggagcagcaaccacatgttatgttgcattgcatccacaagttaaagggttgactggctgctactttgcggatagtaacttagctgaagcaagttcacaagcatccgatccagaggtggcaaggaaactgtgggagtatagctctgatttggttaaattttgatattatgttacctaaggagtagggactaatatctagtgaaagttttcaaacatattaatgatccattaaacattcacttgacctttacctttttcccttgtacagaggaatatatgcttagtttacaatcacaaatttagagatacttgtaatctgattttgtctctaaataaactgcacttctatt

SEQ ID NO: 369 - DNA, 1596 bp, Glycine max
atgacaccttctcgggtgtccggaagtttaactcgatcatcttcacattctggaattttctttcaaggagatgggcagtcacagaatatagttaactctcacttaagctcatcttttgttaactcgtctagcacggttccaggagctggttgttcaaacctcggtccagtttctggggatattaataatgcagttttgaacactgtgacaaactcagcaccaagtgttggagccagttctttagtcacggatgcaaattctgctctctctagtggcccccatttgcagagaagcgccagtgttaacacagactcttacttacgattacctgcctcacctatgtcatttacattgaataatattagtatttctggctcatcagtgatggatggttcctctgtacagaatcagcagcagccgcagggtgcttcaagtgctacatctttgcctgcatcacaaactagaccatctctactccaaatgggcgcacaagtcccaagatctttcattcaagatccaaataatatgtctcatctgtcaaagaaacctagaatggatatcaaacaggaagatataatgcagcagcaggttatacaacagattcttcagagacaagattccatgcaattccagggtcgtaatccacagttacaggcttttcttcagcagcaacagagactaagacaacaacaaatctttcagtcaatgccacaattgcagcgagcgcacttgcaacaacagcggcagcaattacaacaacaagtgatgcagccctcttctgctggcaagcgtccatatgacagtggtgttagtggggtatgtgcccgtcgattgatgcagtatctctatcatcaaaggcaaaggccaaatgataatagtattgcctattggataaaatttgtggctgaatattactctcctcgtgcaaagaaacggtggtgcttgtcattatatagcaatgttgggcatcatgcacttggtgttttcccccaagcagctatggatgcatggcagtgtgacatatgtggttctaaatctggaaggggatttgaggcaacttatgaagtgttacctaggcttaatgaaataaaatttggcagtggagtaattgatgaacttttgtttctggacttgccacgtgaaacaagatttccttctggtgcgatgatgttggaatatgcaaaagcagttcaagagagtgtatatgagtcgcttcgtgttgttcgtgaaggtcaacttcgcatcatattcactcaagacttgaagatcttatcatgggagttctgtgcaagacgccatgaagaacttcttcctcgaaggttggttgcaccacaggtcaaccaattaattcaggtagctcaaaaatgtcagagtacaattgctgaaagtggggcggattgggtttctcagcaagatttgcaaacaaacagcaacatcccaccaaacctgtctcagaaaaacgacgatctcgaacccgttcaccgttggatcgtcatgaaatttgattatcatgttcgcaacccaattcctaacattctcagcgttgggaatttcaaaatcatatctgagcttagagaaaaacccttcgcattgtag

SEQ ID NO: 370 - DNA, 252 bp, Glycine max
atgggggataagcttcatcgtcgagagggaaacagcccggatcaccagctaaggcccctaaatgaccgctcagtgataaaggagatgaacggggctaagcgatctgctgaagctgtgggatgtaaaaaagaatcggtaggggagcgttccgccttagagggaaggacccgcgcgagcagtgctggacgaagcggaagcgagaatgtcggcttgagtaacgcaaacgttggtgagaatccaatgcctaaatag

SEQ ID NO: 371 - DNA, 252 bp, Glycine max; identical to SEQ ID NO: 370

SEQ ID NO: 372 - DNA, 1683 bp, Glycine max
ttgtttcccacgcacacacgtttcacatttgtggtagccgtgttcttctctccatcccaaaatttcggcggtgttcgtgtgcaatcatcttctccgacaatcccaaactcccaaaccaacaacaatttggactcctcacctgagtttctcaattttaaacttttaattgagcaggaacaggacaattctgaagaaaaaaaatgcttgtttcgggtgctatcagcgacgttttggtggtgcttccgccttcgacatctcttagactcccggaatttcgccatttgcatgtttttgcggtttctgacgccaagggttttgtttctggtggatttcttaaaagctgtccttcatcttacaatcccaagcactatcatgaactctacaatttccgagctagaggcttagttgcaagggcatcagctgattcgagggataatttggtgccatttgctcctctccaattggagtcaccagttggtcaacttctggaaaaaatctcaaatacccatccacatctactaacagcagtcattgatcaacaactagagaatcttcagaatgttagagatgctcagaaagaatctgatccatctcaggattccctttacaagaggatagcggaagtcaaagataaagaaaagcgtataacattggaagagataatatactgctcaattgtacataaatttttagagaacaacatttctatgataccaaaaatatcagcaacatcagatcctactggtcgagtggatttatggccaaatcaagagctgaaactagaagcggttcattctccagaggcattggagatgattcagagtcacttatctctggtactaggagatcgccttgtgggtcctctccagacagttgttcaaattagtaaaattaaactgggaaagttgtatgctgcttctataatgtatggatactttcttaaacgagttgatgaacggtttcaacttgagaggtcaatgggaatcctccccaaggattttggaaaagctaaaagttacgatgaaccatcaccgggtatcaagctttgggatcctgattccttgatcacagtacaagattatgacgatgagggttataatgacagtgattacatggatactgatgaagacaaatctttcagactaagagcttatgtgatgcagttggacgcagagacacttcagagacttgctactgtacgatcgaaggaggctatatcattgattgaaaagcaaactcaggccctgtttggaaggccagatattcgtgtctccgacgatggttcaattgaaacatccaatgatgaattgctttcactcactttctcgggcctgactatgctagttttggaggcaattgcttttggatcattcctatgggacaaagaaaactatgttgaatccaagtacccttttcttaatgagtagactagatgacagtacacagattctttcctttcactgcatggaacttggtaacttagtaatatgttaggcggcgtttgggtggtcttgctatcttaactggtgtgctttcaaactattatagaacctgaaacaaatcatgggcgtggagttatataggaaaatgtacatatttagcatgtagacatgataataatctatgcaagcctggactttgtaaatgatacagaatctcaacctagtaaatattttcattttt

SEQ ID NO: 373 - DNA, 417 bp, Glycine max
atgtggaagaagtggaagaaggggaagaagcaattggtgtcatcggcgccgtggagaggcgaggagacagaagaagagtcgttgaaggagggaaagctgaaagtgacgaggcagggtgatggcacttccaccatgcacgtccctgcctccaattccaaacatcttcaccaccaccaccaccatggaatcaacattgatcctcaactacgctacagcttccagcgcaattttcagacacaatttgcacaattagaatttaggggaccaaaaagtactattaaaccattattcattgacactgtgatgaaacctcttcctcctgtacacctattcttctccaaattagtattgtatcctgaaggtattgcaaatgcccagaaatccttgggcataggacaggaagacaaagtttgttga

SEQ ID NO: 374 - DNA, 1224 bp, Glycine max
atggcagcctgcactgtctactcaacacaatctctgagcacaaattgctccatctcaaccccatcaaagacacagctgagtttcttccaccaaaagcaggtagttttctggaggaacagcaacaggggcagcagcagcagcagaagaagctatgtgataacatgtgcagcaggtgactcccagacagtggtgattggtcttgctgcagactcagggtgtgggaagagcaccttcatgaggaggctgacaagtgtgtttggaggagcagcagagccaccgaagggtggcaaccctgactcaaacacactcatcagtgacaccaccactgtcatatgcttggatgattaccactctttggatagaactggcagaaaggagaagggtgtcactgcccttgaccctagagccaatgattttgatctcatgtatgaacaagttaaagctcttaaggatggaattgctgttgaaaaaccaatctacaaccatgtcactggtctcctggatccccctgagctcattaaaccccccaaaatcttagtcattgaaggcttgcacccaatgtatgattctcgggtcagagatctcttggactttagcatctacctagacattagcaatgaggtcaaattcgcttggaaaattcagagagacatggcagagcgtggacacagtcttgaaagcatcaaggctagcattgaagcaaggaagcctgattttgaagcatatattgatccacaaaagcaatacgcagatgcagtgatagaagtgttgccaacccaactcattccagatgacaacgagggtaagattttgagagtgaggttgatacagaaagaaggggttaagtactttagcccagtttacttatttgatgatggctctaccatttcatggataccatgtggaaggaagcttacatgctcctaccctggcatcaaattcttctatggaccagagacttactacggaaatgaggtgtcagttgtagaaatggatggacaatttgacagactagatgaactaatatacgttgagagccacctaagcaacctctctacaaagttctatggagaggttactcaacagatgttgaagcatgctgatttccccggcagcaacaatggaacaggtctcttccaaaccatagttggtttgaagataagagatttatatgagcagctaatagccaccaaggctgagactccagtggctgcaaaagcttag

SEQ ID NO: 375 - DNA, 1465 bp, Glycine max
gtacttttccttctctgaattcaatcgtctttctttctctatttgaggagggaaacggaatcatacttttgttagggttaaaattcatcaatattttcgtgcctcagaatttcgacattttccccataattttgcaattgattgtttgaagaaattttttcagcaaaagcaggcaatggacttcttttttaagggaatgaacagggatggatctgagtgtccctttgatgtgaaagacatccaacggtgtccgtttttaagaaacatcaatgaacctacaaacttctctttctcctcaactaaaatctccattcctgttcatggatccaagggtcctatatttgaagatggtcctagttttggcatggcatttaagctatttcatgggaaggatggagtcattcccctatctgagaaatctgactttcacaatggcagcacagaagcagattctctgcctgttttcaaccctttggcaggaagagctgcctccataagtctgtctggaccaggtggcccatttagtttttggaatttttctgagaaatggaagaagcagaagaattccgaatcatcaaataaaaaggaatactcacctcagaatggagatgtatcaaagcatgaggcacttggaaatgaatggttggccaaaggaacttgcccaattgccaagtcttatagagctgtaagcaatgttctaccccttgttgcaacagcttttcggccaccgagtggagtgaagcttagatgtccacatgcaattgttgctgcaagggctgcccttgcccgtacaacctttgtgaaaaacatgcgccctcagcctcttcctgcaaaaatgcttgttattgcagcgttaggcatggcggttaatgtgccctttggcatgtggaaggagcataccaagaaattttcattatcttggtttgtagccgtgcatgctgctgttccctttatagccatgcttcggaagtcagtggtgatgcctaaatcagcaatggcactgaccattgcagcttctatacttggacaagttattggctcaagagctgagcgaatccggctgaaaacaatagctgttgagatgggaaaagtgaaaacagagacagtatgcagcatggaaagctataatagtcccatgcaacttggtgatattagggccaatcactgtggtgctgaaggaatggtcctcaagtcgtcacttcctgtgaaggatactggttcaacttcaactgctggcgtgtgttattgatctataaagattggaaagaaatccattcaggttctatttgaacatattgatgaactggaattgtaataaaattgattaatataaataagatccttatgagctatgtataacttgaacagaaattaagacatgctgttactatgcatgcagaaatgtatatggagaattgatcgcttaattctgataaaagttgagttcgtcttaaattattcatat

SEQ ID NO: 376 - DNA, 6338 bp, Glycine max
cattcctcatcttatgtatcctccatggtattggaggattagagttgagtcagttgacgctgggtgttactctccattctggaaaatattatataaaaaagttgtttttgtaaaattaagacctcagttgttatgcctgatgctaggtgttagtaagggccagtggcactagtcaatagaagtagatcgagaaaacaatctgatatgaattttcagtgatggcttgtgactggtattaatgaacatgtgtggataatagtcattcgttaactccatatagtgtcacatagctattggttggctcctaaaatatggggtaggtgctcctggcttttgtttgcaccaaaatgaatttccttaggtgatgtgcattttagtcgaaatgaattgatttattaaacagtaaacacttcattggaccctttttgggatttgatcagtagaaggttgttaaggttttatgcagttgagctctttttttacggggctttgatgcaatttagagcaaaatgcaagaaatttaccatgtgaggattgcgtgtgcaacatccctagatcatcctttcatacaaggttctcacatgactaggtcatcttgtgcaacacccctagaattcctacacgactgtgatgtaaaagctgaagacgctgttgattatgaagatattgatgaagagtatgatggtccagagacagaagctgccaatgaagaggactatttattgccaaaaaaagaatttttctcttctgaagcctctgtatgtttggaatccaaagcttctgtctttgatgatgaaaattatgatgaagaatctgaaaaggagcaagactttgtgaatgacgattctaaagtttataacatccctttagctggggagcaggaagagagttttgtggatgcatctaaagaagagagttcgcttgaacatgaattacatgttgactcaccgcagactgaagagttggatgctgatgtacaaaaacttgaggaggatggccctgaagttcagaaaaggtctatggctatgccattgcctgttttatgtgtggaagatggtgtggcaattttacgtttctctgaaatctttggcattcatgaacctctcagaaagggagaaaagagagagcatcgacattctattcctagagatatatacaagtctttcgatttaactgatgattttgtagaagaggatgaagaggaatttctgaagggcttctcccagagtctctctctttctaaacaggtttgtgtagttcataatgatgtatcagaaagcaatgatgttgacttggagtttccaaaatttggatttcttcatgcggatgcctcagtggacaggaaagatgatcaacaatcaaaggactcgtgtcatagtgctgaaccgatgaaaggggattttgtagaagatcatttctggaaagatcatcctttcatgttggccaacttttatcctcttgatcagcaagactgggaagataaaatcctttggggcaattctcctgttccaagttataataatgttgaaagctgtgaaatttctggacccgagttgggagcttctggtggcagtgaaatagaaattgaaagtgggatccataatattcagatggagcctcagaaggtactggaggataaaaatcataatgtcttaatgcgcagctctcctgtcaaattggagccctttggctcaagggattcttctggagctaagaccaatttaatatccagaagtctctttcacccccaacttctaaggttagaatccagatctgaagtggatagttctagtcttgcagatggaagagatgcagagatatctgagcataatcaaagtggtcaagtgaagcgctttaccaaggttatatcacaaaacagagacatgatggagggctcctggttagacaagataatatgggaggagcttgatcagccttcagtgaaaccgaagcttatctttgatcttcaggatgatcaaatgcactttgaagttttagataccaaggatggtacacatctttgccttcatgctggggctatgattttaactcattctttaaaattaagcagcggggattcttctgagttaccaggacatggaagtcaatatggatggcgatatgttgctaatgacaaacactattcaaaccgtaaaacttctcagcaactgaaatcaaattccaaaaaacgctcagctcatggtgtcaaagtttttcactcacaacctgcactgaagctgcagacaatgaaattgaaattgagcaataaagatattgcaaattttcaccggccaaaagcactatggtatccccatgacaatgaggtggctgtcaaagaacaagggaaattgccaacacaaggacccatgaaaattattataaagagtttgggtggcaaggggagtaaactgcatgtcgatgttgaagaaactctctcttctgttaaagcaaaagcttccaaaaagctagattttaaggtatcagaaacagtgaaaatattttatttagggagggagcttgaagatcacaagtcacttgctgcacaaaatgttcaaccaaactccttgttacatcttgttcgtacaaagatacatttgtggccaaaagcacaaagggttcctggtgagaacaagtccttgcgtcctcctggggcattcaagaaaaagtctgatctgtctgtaaaagatggacatgtttttctgatggagtattgtgaagaaaggcctttacttttgagcaatgttggaatgggtgcaagactttgtacatactatcaaaaatgctcaccagatgaccaatctggctccttattacgcaacacagatagtagattggggcacattatttccctggatcctgctgataaatttcctttccttggagatttaaagcctggttgcagtcagtcatcactagagacaaatatgtatagagcacccatatttccccataaagttccattaactgactacctgctggttcgttcatcaaagggaaagctatcattaaggcgcattgataaaattaatgttgtcggacagcaggagcctctcatggaggtattatcacctggaagtaaaaatcttcagacttacatgatgaacaggctattggtacacatgtgccgtgaattccaagcagcagagaagcgacatttgcctccgtatattggtgttgatgaatttctctcacagtttccttaccaatcagaagcatcattccgtaagaaaatcaaggaatatgccaatttacagaggggaacaaatggacagtcaattttggttaaaaagcgaaattttcgcatttggtcagaggatgaattgagaaaaatggttacaccagagcttgtttgtgcttacgaaagcatgcaagctagcctctaccgtctaaaacatttaggaattactgaaacacacccgactaatatttcatctgcaatgagtcgtcttcctgatgaagcaatagcattggctgctgcatcacacatcgagagggaactgcagattactccttggaacttgagttgcaattttgttgcctgtacaagccagggtaaggaaaatattgaacgaatggaaattactggtgttggtgatccttctggtcgtggcatgggttttagctatgctcgggcacctccaaaggcaccagtgtctagtgcaatggtgaaaaagaaagcagctgctaaccgtggaggttctactgttaccggtacagatgctgatctacgtagattaagcatggatgctgcacgagaggttcttcttaagttcaatgttcctgaggaagtcattgcaaaacaaactaggtggcatcgcattgctatgatacggaaactttcaagtgaacaagctacatctggggttaaggttgatccaacaactatcagcaaatatgctcgtggccagcgaatgtcctttcttcagttacagcagcagaccagagagaaatgccaggagatttgggatcgacaagttcaaagtctgtcagctgtaaatggtgatgaaaatgagagtgattcagaagggaatagtgatttggattcttttgctggagatctggaaaatttacttgatgctgaggagtgtgaagagggagaagagggtaccaatgacttaaaacgtgataagggagatggcgttaagggtcttaaaatgagaagacgcccaactttagctcaggcagaggaggaaatagaagatgaagcagctgaggctgctgaattatgcaggctgcttatggatgattatgaagctgacagaaagaaaaagaagaaagctaaagttatggtgggagaagcaagattggtaccgaagatgcaatcaaaattttcctttgacaatgctgaacaagttaagcaaataactaatactttacaattagatggaactaatcacttgaaagaggatgcaatcacagatcttagggaggaggaaaacgttcctgctaaaaaaagcaaatcactgaaggtcaataaagccaagaagaatgatattatgcctattagtatacccaataaaaaaatcaaattgaatatgggagaaggaattaagaaccaggtatttaaggagaaaaaaccatcaagggaaacttttgtttgtggagcatgtggtaaggctgggcacatgcgaacgaataagaactgtccaaaatatggtgaagatctagaaactcaacttgaatctgcagacatggaaaaatcatctggaaaatctagctttgtggatccctctagtctctcccagcataaagctccctccaaaaagtcaatgtctaaaagcgcaacaaaagttgctcctgttgacaattcaacaaaaattccattgaaattcaaatgcagctccacagagaaatcttctgataaacctgcagtagaaaccctgcagagttctgacaagccagtcacttctgactcagaaactgcaaagtctgctaaggttaataagataattattcccaagaaagtgaaaccagatgatacgctggctgaatctcgtaagcatgctattgttatacggcctcctactgattcaggtagaggacaggttgattctcataagttcccaattaaaatacgcccgccaacagaaatagatagggagcaaagccacaaaaagattgttataaagcgtacaaaggaagttattgatctggaactggacagtcctggtggaaacactggacttcaacacagaaaaactaaaagaattgttgaattgtcaaattttgagaaacaaaagaaacaggagactgtgtatggaactgaaggttttaaaaaatggaacagtaaagaggacagaagatggagggaagagcaagagaaatggagaaatgatgcaaggcttcgagaagaagacagagcaagaaggcatcacaaagaagaaatcaggatgctcaaagagcaagaaaggttagacgagataaaaagatttgaagaagatattagaagagaaagggaggaggaagagcgacaaaaagctaagaagaaaaagaagaagaagaaacctgagttaagagatgagtatttagatgaccccagagcaagaagacatgataagagaatgccagaaagagaccgaagtggaaaaaggagatctgttactgagttaggaaagattggtgcagattatatgccgccaacaaaacgccgaagagggggagggggagaggttggtttggcaaatatcttggagagcgttgtggacaccattgtgaaagataggtatgatctatcgtatcttttcttgaaaccggtgtcgaagaaggaggctcccgactacctggacgttatagagaggcctatggatctttccagaatcagggagagagtacggaatatggagtacaagagccgagaagatttcaggcacgacatgtggcagattacttttaatgcacataaatataacgacgggcgaaatccaggaattcccccgcttgcagatatgcttttggaatattgtgattatttgttgaatgagaatgatgatagcctcactgaagcagaagctggcattgaaattagagatttctaagccatttcaaattcagatcatgatctggaggtctgtttggtagagctaaatgatttttcaaatgttgtgtaaatatggttttaaaagataccaaaatgcctcctgtatttttattaacgatatgcaaagagggttgcaagttgtaaacaagggtgatgtatcaaccatgtagctcgttaaattttcagcgtgtaacaatgtagattgagaccactaaaaagaattcttttagatgataaacaaacaaaataaaagcagaatagcagtagttatggacatatgtatttactatcagtaatcttt

SEQ ID NO: 377 - DNA, 1714 bp, Glycine max
gcgtgtcgtatccagtgtgcggtgcagttaaagtccaaaaaggacgctctttctcccccaagattttctctcccctctttctcttaacatgattcagttttcactttcattgtcacaactcattcattcaattcaattcaattattatcataatttctgtgttctgtttctgttctcttctaagtaactatttggaaacctctctttctatttctctctctagaaagtcccagccagccaggggtgaagaagaatggatgctataaggaagcaagcaagtaaattgagggagcaagttgccaggcaacagcaggttatacttagacagttgggccaaattagcaatgaaccgctcatgattgatgaatccgaaattgaatgtcaccagcaacttcaaaagttgtacacttcgacaaagacagctaagcattttcagcggcatattgttcgtgcaattgaaggattcgtttctgtttgctccaagcaaatggagatagtgaggaggatggctagggactgttgtaagtatgggacagagaatcttggtagtagttacctccttgcaagggcttctcttcaatttggtaacacatatgatacaatggaaaatgagagagagactctgctcgggatcttaggcgatcagatctctgagccactacgggcacagataacaggagctcctttggaggatgcacgccacctcactcgccgctatgacaaacttcatcaagaggtagaagcccaggctgctgaagttttgaggcgtcgatcaaagttgaggaattcttctgtttctgcagagagttccgcgaggcttcaaaatgcagaaacaaggttgaaagaacttaaatctgccttggcagcacttggtagagaagcaacctctgctatgttgtctgtcgaagaacagcagcaacagatgactctccagagccttcgtacaatggtggatgctgagagatcctatcatcagcatgtccttgttattctagagaaactatatactgagataattgaggacagacaaccaaaagaggctacatcatttacactgccaaaagatggatataatcaacctgcagatgagaatgctaattcaagtggcattgattataaacacaacagtcaaacagccacatacttttttgcaaaggtcgtacatccatttgatgctcaagctgagggggagttaagcctatcagttgatgattttgttgtagttcgtcaggttggacccaatggatggtctgaaggagaatgcaaaggcaatgctggatggtttccctctgcttatgtagagagacaggacatgataccagccagcaagataacagaataacttcacaggataccaacattggtcttttgattaggtgaggcaaaaattgtatattataatcacggaatagatgcagcatttgaaaagccatagcatgtgcttgccattatttttgggtggttctatcatctcatctgtgcaatatgttgtatatgcgagtcataattgaaataggaaatagcactggcagtttgaatatgtaattgatatgtttattattggcatttgctttggccctttggtcaggaacttagttttatgctgttcatattctatagcattgtttgtaattctaaatgaagatatggcgagaaacattgtatttaagaaatcttcctatgcatcaatatgaaaaaagtaatttgtatctat

SEQ ID NO: 378 - DNA, 1395 bp, Glycine max
atgggtgttgtggagggtctcttagcattggctttggttctgagtgtttgcgtgatgtgcaatggaggctcaagcagccccttcattaggaaagttgagaagacagtggatatgccacttgacagcgatgtctttgctgttcctcctggttataatgctccccagcaggttcatataacgcaaggtgaccttgtggggaaagcagtgatcgtgtcatgggtgacagtggatgaaccggggtcgagcgaagtgcattactggagtgagaacagtgacaagaagaagattgccgaaggaaaacttgttacttataggttcttcaattactcatctgggtttatacaccacaccaccatcagaaatttggagtacaaaaccaaatactactatgaggttggacttgggaacacaacacggcaattttggtttgtgactcctcctgaaattggtcctgatgtgccatacacatttggtctcataggggatcttggtcagagttttgattcaaataagactctttctcactatgaattgaacccaagaaaaggacaaactgtactgtttgttggagacctctcttatgcggataactacccaaatcatgataacgttaggtgggattcttggggaaggtttacagaaaggagtgttgcttatcaaccatggatatggactgcaggaaaccatgaaattgattttgccccagaaattggtgaaaccgtacctttcaaaccttatacccaccgttaccatgttccttataaagcatctcaaagtacttcacccttctggtattctatcaagagagcttcagcacacatcattgttttggcctcatattcagcatatggaaaatatacaccacaatataaatggcttgaagaggagctaccgaaagttaacaggacagagactccttggttgattgttctgatgcattcaccttggtataatagctacaattatcactatatggaaggggaaacaatgagagtaatgtatgagccctggtttgtgcagtacaaggttgatgttgtttttgctggtcatgttcatgcctatgaacgatctgagcgtgtttccaatgttgcatacaatattgtaaatggtctttgtgctcctgtaaaagatcaatcagctcctgtatatataaccattggtgatggaggaaaccttgaaggtttagcaaccaacatgacagaaccacagccagagtattcttcattccgagaggccagctttggacatgccatttttgacataacgaaccgaactcatgctcactacagctggcaccgaaatcaagacggagttgctttcgaggctgattccgtttggtttttcaacagatactggcacccagttgatgattccacggctcatgtttcacattaa

SEQ ID NO: 379 - DNA, 2266 bp, Glycine max
aaatcattaactttgatacgaagaatatttcatcaaagagagagagagagtactaagtgttaacagtactaagtactaacaacccaactaatgatcaaaagaagaaatccatatttttggacctcaatcaggaagaatttggatatacagtttatctacagctcaacaggagaatgttcatcatataatcatgagagggagcgagaacgaaccgaacgagggatgcctcgctagggtttgcgacagagatattacaatgtttttttaactaattcttacttaataaatggaaaaaaaaattaaatgcttttttttatatgtttaagatattaaatatatatatattaattaaatgaaataaatatacctttaatgttttttattttgaaaagagaattaatatttttgagggtgaaagtaaagagaaatgaatgaaatgatatagttgagtttggagcgaaacagaagagaagaaagatccaccgatgaagaaaaataaagagaaagagaaagagaagtgcgtggctgtgacaagccctgtgagtggcgaagacagcgatgataagcaacgccctgcctttccctcggtcagattctcttcccgcaacgcttcttccaaatacgatttcgtcaaggtgaaggtgtggttgggtgataatgcggatcactactacgttctctccagatttttgctcagcagaatgctaacggtaaccaagattccaaaccacgtagctatcaaaattgctctcgaattgaagaagctgctcacagataacagccttctagatgtctctcaatctgacttggaagtcaacctatttaagcttatggagcggcggggatatggagaagagtacataaatcgttacaagatgatgacaagatttcatcatcaaagagttccattagtaatccttgtttgtggaactgcttgtgttgggaagtctactattgccacccagcttgcacagaggctaaatttaccaaatgtattacagacagatatggtttatgaattgttgcgcacatcaacagatgcaccattggcatcaactccagtatgggcaagagacttcagttcatcagaggagttaataactgaattttgcagagaatgcagggttgttcgcaaaggtttggccggtgatctgaaaaaggcaatgaaagatgggaagccaattataatcgaggggatacatttggatccaagcatttatttagtagatgatgacaataaatcaccttctggtgtacattcagaaaataaagagataaatccagcatttatgacattggatgataatgctactgcacaaataaaagacagtcatgtgagtagcagtgatgagagtaatggtggctccaggattttgagctctgatgaaggagtatctgcggaccaggttgatgcagtatcaaattctatggcatccattggcctagctgaaagcatccctgaacataaagttgcttctcttagggagctggagacagacaaaactactattagtaaggagaagtcaggtcccaaaccaataattgtgcctattgttttgaagatggctgaatttgatcataaggcattacttgaggagtggatctctgctcgcacatttaatgacaaatgtcctgacctggataatgagaagcttatagccaacttgaaaaccatacaggattatctgtgctcgttcacatcacaggggttgactgtggtcaatgtatcggcaacaacatttcctcaaacattggattggctgcatggttaccttcttcagtgcatcgagcaaggtattgaagaaaatgttacaccagtagctccagcatagtccatgtaatgaatgcttccaattttgacagagatggtttctagattcgacttcactttgtaaatggatgatgctggagaataacttatcaaatcaaaaagggaagtacgatcatgttcaaagctatctactcaactgatcgccagccccattaccgtcttgctttgcaatatatgattattgatgatatctcattttgtgagcagatcatggcttggggataagagagcagcgtaaccgtataaatggatgttgtaattattgcattatcaacatttgctactaaattaattgtatgattatcatgttgtgttttgatgagaaatttcacacatccattcctttgcgttgtgagtagccgctgctaaaagtaaatagcatatagctagttagggggctctgccttctgccgcgcatcctttgaatccttttgt

SEQ ID NO: 380 - DNA, 1314 bp, Glycine max
taaatagtgttgcccgttcagtggtagagttcccgagcaacgaaagctaggtcacgggttcgaaaccatttttcgtgaaaataggtgttttttttagttcgtcgttttgctcttcgtgttgttgaagtgcaacgccatggatccagatcagggcacttcaaaagcccggaagcccaagttcaaacccaggaatctcaaagcagtccgagctcccaaaaccgaagcggatgataagcgaaacgaagatagcgaagtgcctcgagctctctcgcgtcgacgacatgaaaatcctgcaaaacgcgagcctaaagtcgaaagaaaatctagcgtggaagttgcatttagtcttggaagttcatcatcacattccctcaggacatatggcacaagcaaatctatagatagtggcacaagcagtggttcaccatctaaatattttgccaatgaacaaattcgttcaattgctactgaggatcaaaatgatgcttctaatgcatctgccaggaaaatcaaaagagagtacaaggaaccatgggattatgaaaactcttactatccgactactcttcctttgaggaagccaaattctggagatccagaaattcttgatgagaaagaatttggtgaagctgctactagtgtggagtatgatgagaatactgttaattctgctgcagaactcgagatcttgattcctactcctctgcctatggacaagcagagtaataaggggaaggagaaaattggtacatcaacagtatcgggagaggccacaaagtcaaagaatgccttggaagagttgccgaggggatatatgggcaaaatgctggtgtacaagagtggagcaatcaaactaaaattaggagaaactctgctcgacgtgtctccaggttcaaattgtcgatgtgttcaagatgttatggctgtgaacactgcacagaaacagtgttgcaatcttggcgagattagcaaaagggttgttgtggttcccgatcttgattcaattgaactgtaaaacactctagacaaatatgactaatgcaccacatacagggatagtacagtaccttgttggcttatgtgaatatatgtgactaaaaagacacggacaattggcaagtgccaattggatactagacctagcatttgatattaatgaaatatcaagtggatgattgaactcattattttgttattgttttcttttatccgtagaaaccaaatcaggtaacaagagatttacaacaacttacgcacaatgttaaactaattaagggatctacattttttctgttattgcttagttagatgatt

SEQ ID NO: 381 - DNA, 1601 bp, Glycine max
aagaagattttgttcctccgacttcgaatgttgtcctgaatttcttgaagctccatcttggcaaaatcctgtacagtttcggggccttcaatgatgcagaatctgcggagagaatagaaaggaagaatgaagaaaggaaaaagcgaaagaaagagaagagaagagaagagaaaagggaaggagagggacccagcagtggcggttttgtctgagtcgagagagggtgattcctgggccatcaaacgccatctgggcctgttaatggtgttgtccctcctccgattccaactccaaccgtaagagaccccgccgaatcgacccagacacagcatcttcccaattcactcacgcaaatcaaacaacatagaatttgcagacgcaagctcctgccactttgctgctattcactatataaatatttaatcaagggggtgaccgggggaggagtggattttctcggagcccgaagacgagcctgacccaaaccaaacgaaaacagaacccctttaaaattaaaccctagcctcgcaatttcgaaaattttcactcactcctcttattctcagaaaagagaagaagaaatggtgtcaggcgtgagagagataagctgtagcggagagccagtccttgacagtgatagcggggaggagttgatgcaggtacaagccggcatagacattgtcctcggcgatcttcctcgtcagtcccccggcacgctctatatcactaacaagcaagtaatatggttgagtgatttagacaagactaaaggatatgccgttgattttttgtctatctctctccatgcagtctctagagaccctgaagcctatcctcttccttgtttatatacccagattgatacaggagaagctgatgatgaccacactgattctgaatccattcatatcccacaagatttgtccaacatcgcagagatgaggctcattccctctgatcctacacaattggattctctctttgcaatattctgccagtgtgcagagcttaatccagaaccaaatgatggggaaggagaagaacatggttggttttttagtgctgatcagatgggagatgaagaagcagaggaagaaggttatatctctcaccatccagccaactctattggtcactcaaatggaaatcatgacctagctcgtacaatacttgagcttcaaatcaatgatcaaagatttgaggatgcagaagagatggaggataatggagatggcaccaatcgttgagtgtctgtgttttctccaaaatagcattttctagtctgtaccaaaagtcatcgactgattgttgtgtagtttggttctatataatgtaatcctattatgaaacatctgaccagaggcttagagtttttttatcttggaccttcgtttttgtttttttttttcctgcaatagaaagcagctggatactgagtttaaagctgtattatgtagaacaggagaagaaatttgaaaattgtttggatagtttattgagaaagaatttgcaaataattttagtgtatttggttctccatcgtgagcattccaacgcaggcaaatggagaaccgtatctcttgatgtttcctgagtaaatg

SEQ ID NO: 382 - DNA, 1869 bp, Glycine max
ccgtttgccgttgaaaccgcgaaaaattcctcttttctctctcaaacgtctttgttttacaaaacggcttcgatttacttttgtgtttgtttgtttcttcccctttccctcttctctgttctcattcaccgacccttattgctatctgggtcggcaatgtttttcaattagtgtttctgcgttgtttcttcttcatttttgctttctctcgaagctagctcgctctaccatcccgagatggatctcagagaaagattggtacgtcttgttgtgagcttgttcgttgttgtgcaactttgttgccacgccaatgcgaatatggtgttccccgttgtgcgcaaattcaaaggtcccgctgaaaacctcgctgctatcaaagctcatgatgctggtcgccgaggtagatttctctcggtcgttgatctcgctctcggtggcaatggccgtcctacttcaactgggctgtattataccaaaattgggcttggcccaaatgactactatgtgcaagttgatacaggaagtgacactctgtgggtgaattgtgttggctgcacaacatgtcccaagaaaagtggtcttgggatggagttgaccctctatgaccctaactcatcaaaaacttcaaaggtggttccttgtgacgatgaattttgcacttccacatatgatggtccaatttctggatgcaaaaaagacatgtcctgcccgtacagcataacttatggagatggaagtacgacctctgggtcctatattaaggatgatcttacatttgaccgagttgttggtgatctccgtactgtacctgataataccagtgtgatttttgggtgtggttctaaacaatctgggacattgagttcaaccactgatacatcccttgatggaataattggttttggacaagcaaattcttctgtgctttcccagcttgctgcagctggaaaggtgaaaagggtattttcgcactgccttgacaccgttaatggaggaggaatatttgccataggggaagtggtgcagccaaaagttaagacaactccattggtaccaagaatggcacactacaatgtggttttgaaggacatagaggttgctggggaccctatacagctccccacggatatatttgattctacaagtgggaggggaacaataatagatagtggtacaaccttggcttatcttccagtctcaatttatgaccagctattggagaagactttggctcagaggagtggaatggaattatatcttgttgaggatcagtttacttgtttccattattccgatgaaaaaagtcttgatgatgcatttccaactgtcaagtttacctttgaggaggggcttactctgacagcttatcctcacgattacctattcccgtttaaagaagacatgtggtgtattggctggcaaaaaagtacggcacaaactaaggatggaaaggacctaattcttctcggagatttggtgctgacaaacaaattattcatatatgatcttgacaatatgagcattggatggactgattacaattgctcttccagcatcaaactgaaggataacaagactggaactgtatatacaaggggtgcacaggatctttcttcagcttctactgtgctaattggaaaaatattaacgttctttgtgttgcttattaccatgctaagcacttaactgaatgatattattgtatcgagagatggcatttaatttattttgttgtaacataattccttgaatggtgagcttgatgcgaataaattaattatttatcgtcgtgttagataggggagacttttcaaagttcttttcaattacctccttgtacaattttccaaatagggaaggcaaaatatt

SEQ ID NO: 383 - DNA, 1507 bp, Glycine max
tataagaataaatttgagtccgtgcgacatgcgtgcatatattatgtcaccactcaccaactctctctctcttttttctaagaaagtcattactcattagctcttatttgacggcaatgctcttaatctataaaagatatatggtgtctaaatgttcagcatgaatatatagctaggcaaagaagagcaaaagaaaatcacattacctgtctctgaaatcagattcactttgttcttcatcaatggaaagagaacaactatcccttcacatgaatggtggcaagggacaaaggagttatgcaaacaactcctcactacaaagaacaataatacgtaaaaccagatccatacttgaagaaactataacgaggttgtactgtgatacttttcctaataattgcttaaaagtggcagatttgggttgctctgtaggatcaaacacacttcttgtgacatcaaatattattgacattgttgataacagaagcactcaattgaaccgtgaaccccccaccttccaattttatctcaacgatttatttggaaacgatttcaataccatcttcaagtcactccctggtttctatgaaagattgctagaagataagggtcacaagtttagtccatgctttattaatgcaacccctggatccttctatgggaggctctttcccagtaattccataaatctttttcactcctcctacagtctacactggctttctcagggtttgattgaagaagaaaaaatggactcctttaacataccagcttataaaccaacggttgaagaaattaggcatgtgattgaggaagaagggtcattctttgttcaacggttggagattttaatctcgccttggtacgaaggcataaatattgaaggtggtgatggtttttttgttaatggaaatgtaagagccgaatacattaccaagaacataagagcagtaatggagcctctcttgtctacaaagtttggtggtgaagttataaatgaactattcatcaggtttaaaaagaaaattgagcaaataatggaggtggagaaattggagggtgctactttggtgatatccatgacaaaaaatcattgaagatcatatctgttgctcaaaagatcttaaaaacttgtttttcttcgttttgtgaacttgttttgatttgttaaaataaagttatggagcagtgcatgatataataaaagatgattttccacagaacattttcaagataacataacagctattttgtgggttagtagagaacattgtagaaaacatactagacgattttccacagaaattaaattaacgatacaaatatcgagtgttctaaataacaattcaaatataaaatatctcataatatcatatgcatattttagcatctatgttataaatgttgctataggttataattttactaattgtgaaaatgttagacaatcagattattttatttaattatttggccttattgattattgaacgaatgactggttcat

SEQ ID NO: 384 - DNA, 3381 bp, Glycine max
gtgtatgatgattctcttaacaaccgtaagcttcaaatgttatagctttgtgttttagttatctgggaaaattaagtccaacaagcttgccaactttgaacttcttccaagtttccaaccagaaaaatcagcctcagttaatgatatactgtaatgccggttctgagaattcatggatatgccttggctgtttcgttttgtcttatcatcttcatagcagcctcacaacgaacggacccttcagaagttaatgcgctgatagagatcaagaaaagtttgattgatactgacaacaatcttaagaactggaataaaggagatccatgtgcagcaaactggactggggtttggtgttttgataagaagttggatgatgggaacttccatgttcgtgagatctacttaatgacaatgaatctctcgggaagtctatcacctcagcttggtcagctatcccatcttgagatactggatttcatgtggaacaatctgacaggcacaataccaaaggagattggaaatattagatcactgaaactcttgctcctgaatggtaataaattatctggtagtttaccagatgagcttggccaactttctaatttgaatagattccaagtggacgaaaaccaattgtcaggtcctataccagagtcatttgccaacatgaccaatgttaaacaccttcacttgaacaacaactcatttagtggtgaacttccatccacactttcaaagctatcaaatcttatgcacttgcttgtggacaacaataatttatctggccatcttccaccagaatactccatgttagatggattggcaatactccagcttgataacaacaatttcagtgggagtgaaattccttctgcctatgcaaacctaaccaggctagtgaaattaagtctacgaaactgtagtctgcaaggagctattcctgatttcagttcaatacccaagcttacctatttagatcttagctggaatcagatcactggacccataccatcaaataaagtggcagacagtatgacaacttttgatctgtccaataatcgtctcagcggatctattcctcacttcttgtatcctcatcttcaaaaattgtcacttgcaaacaatttactgtctgggtctatctctgctaacatatggctgaacatgtccttcagtgcgaaagataaacttacaattgatctccagaacaactcattttcggatgttttgggaaatctgaaccccccagaaaatgttaccttgaggctttctggtaatcctgtctgcaataattctaacatacaaagtattggtcaatattgtggacctgaagcagataaggcagcccaagactcaacaaattcaactgtctgtccagttcaatcttgtccagtggatttcttttacgaatatgccccctcttccccagttccttgcttttgtgcagcacctctgagaattggatacaggctgaaaagtccaagtttttcttactttgctccctatagaactagttttgaagactatataactaggtccttagacttagatctctatcaactatcaatagattcagttgcttgggaagagggacctcgtcttagaatgtatttgaaactcttcccttcctataatgattcccgttctaatatgttcaatgaaagtgaggtccgtcgcattaaaggcatatattcatcatggcactttcctcgcactgatttttttggaccatgtgaactgctgaacttcactcttcttggaccttatgcaaatttaaatattgattcggagaagaaaaataatagtttgggcataaaaattgctgctgggatagcagcagctgcttctgctttagcaatatctgcaataatcattttcctgatttctagaagaaatatgaaataccagaagattttcaggaaacgaatgtctactaatgtatctatcaaaatagatggcatgaaaacatttacttacaaagaactggctattgctaccaacaaatttaatatctcaactaaagttggccaaggaggatatgggaatgtctataaaggcattttatctgatgaaacttttgtggctgttaagcgagcagaaaaaggttccttacaaggacaaaaggagtttctgactgagattgagcttttgtcaaggttacaccatcgaaatcttgtctcgctgattggatactgtaatgaaggagagcagatgctggtttatgaattcatgcccaatggcaccctaagggactggatttctggtaaaagtagaaaaaccaagggaagcctaaattttagtatgaggttgagaattgcaatgggagcagccaaaggcatactgtatctgcatacagaggctaaccctcctatattccacagagatattaaagccagtaacattcttctggactccaagtttacagctaaagtggccgattttggactgtcacggcttgtactagacttagatgaagaaggaactgctcctaaatatgtgtcaacagttgtgaaaggaactccaggttacctagacccagaatatttgttgactcataagctgactgacaaatgtgatgtctatagcctgggaattgtgtatctggagcttttgacaggcatgcaaccaatatcacatgggaaaaacattgtccgcgaggttaatacggctcgtcaatctggcacaatatattccatcatagacagcagaatggggttatatccatccgattgcttggacaagtttttaactctggccctcagatgttgccaagacaatccagaggagaggccatcaatgctagatgtcgtgagggaactggaagatatcattgcaatgttgcctgaacctgaaactcttttatcagatattgttagcttagacagttctggtaacatagcacccccatcatttgcatcaacatcagcatcaaatgtgacaagggaggagcaacacatgtcctcatatgtttcaggaagtgatcttgtcagtgatgtcattcccaccattgttcctcgctgatgctgtactatgctagtctacttcaataagtgatcataatcaagtgatcaagtgatcaagtgcaaaatatggtgctggtcggaccaattatctcacctttttaaccagctttttttgtctttcaaatgccaaaaaatatataaaataatattttttaacatacattttaatcaaacaaaaaaagtaattcattgcaggaaaaaaacgtttagtgaattattaaattattaattaattaaacacagaagtaatcataaaaaaccataatgggtcgttacaaccagtcaatttaaactagtccacaatgtactattttctacatggaatttaataaaagtcatccttcctttctttcatata

SEQ ID NO: 385 - DNA, 2139 bp, Glycine max
gcgcactttctctcccctcccacttttgagccttctctctcgtcagaacagatacgctgaatatcttcttcctacttctctaatcttcccacccttcttctagagagagaaaattcacttcatgtcttttccaaaggcatcaacttaagaagtgggtggtggttttttcacttttcatttgtttcaactttcaactttcaaatccctctttgcctctcccagttttctaggaagttgattttcttggaaatattattattttaaccttgtgtatgttgtaagttgtttttcatcttttctggtttcttcttcttcttatcttgtttctcttttccttttttttttaattttatttagatgaactgcacctacaggtcagcttctcactgaagcataaacagggaatattgattcttttcaggttcttgtgagaggaaaagattgtgtttttgtttttggacttttgattgttgtggatgaggggggggggggggggttgatttttactatggagacatgtttatttaggaaggtagattctggggggggtgggtttgttctgttgttggattaaaagaattgttttttttaatgatttttgaaaaaaagaatatttgtgggggtaaccgattagaatgaggagttcaggtatagtttaaggttgcaacatgagcttcagagaggggaagatagaaggagaagatagggaatgtgaagaatcggtgttggggagcactgaatccaaatcagtgagggaaaatgggtctttagcaagcactcagctgacagttgatgagaatctattggttgaccctaaactactctttattgggtccaagattggagaaggagctcatgggaaagtttatgaaggaaggtatggaaataaaattgttgcaatcaaagttctgcatcgtgggagcacttccgaagaaagggcttcccttgaaaatcgttttgctcgagaagttaatatgatgtctcgcgtccaccatgacaatcttgttaagtttattggagcatgtaaggatcctcttatggtaatagttacagagctattaccagggatgtcactgcgtaaatatttaacgagtatccgtcctaaactattagaccttgatgtggctataaactttgcccttgatattgctcgagccatggattggctacatgccaatgggatcatacacagagatctgaaacctgacaatctattgcttacggcggaccagaagtctgttaaacttgcagattttggtcttgcaagagaagaaactgtgactgaaatgatgactgcagaaacaggaacttaccgttggatggcaccagagttgtacagtactgtgacattgcgtcagggagagaaaaagcactacaacaacaaggttgatgtatatagctttggaattgttttatgggagctactaacaaaccgcatgccctttgaagggatgtccaatttacaggctgcttatgctgctgcatttaagattgcagcaagagaggcccggcattccagatgatatatcccctgaacttgcttttgtcatacaatcttgctgggttgaagatcctaacttgagaccaagctttagtcagatcatccgcatgctcaacgcgtttctcttcacactctcaccaccgtctcctcctttgccagtaccacctgacaatgaacctgaggtggctacaacaagtaatggcaccattactgagttttctgcccgaaacagaggaaagtttggctttcttcgccaattgttttcttcgaagaggaccaaaaactaacattgagcgctgaattttttttaaaattcccttttgttgtagatgaaaagagttgccattctatggtatacagttttaggacatttatgagttaaccatctcaggtgaccaaaaggatgtaacatgttccataaaagaaaagaatgttgtttatagacttttgaaagattaaggaaagaaaaaaaaggattgtttacattatctagtagatcttgctgtaaaggaacaaattaatttagacattttcctgctttgagaaaggtaattactgagcattgtaaagtagttgtttccaaaggatgctcaagggtaactttatgcttatttgggagtgatatttctgattagtta

SEQ ID NO: 386 - DNA, 594 bp, Glycine max
atgtcaaatctcgacggtgattcgccgaagatacacgttgagactccgccggtggcgccttctgcgccgagtgagggccacctcgcgccggcgagccacggcggaatcggcggaatcctgcggcggtggaagagggaggacttgatcaagagagggtcgttgggactgagaggggtcgctctgcttttctctctgatttcgttctttatcatggccagcaataagcatggggattggagagagttcgataaatatgaagagtacaggtatttgcttgctatagcgattttgtctagtttgtacactggagcccaagcgttccgtctacttcaggaactctccaccgcaaaacaattgcttcagccaagaatggcagctatgattgacttttttggtgatcagatcattgcatatcttttgatatcatcagcatcttcagcaattccaataacaaatagaatgagggaaggggcagacaatatattcacagactcttcagctgcagccattagcatgtcaatttttgccttcttgtgtctagcagtatcagccctcatttcaggctacaaattatcaactcaaccttatatatga

SEQ ID NO: 387 - DNA, 1075 bp, Glycine max
taaaatgtgggttcacttaaactttttgttattaaaaaaaaaaagaagaagaagaagaagaaaaaactatccaagtgaatgagcatatcggatttgacggagaattatctctagctatataaaggaagagtgggggggttggaaaactaataaaaaaacagagcaactctgtttactcatctggtgttagaatggatagttcctctcatcagctcctccccttcaacgaaaacgacccagaagacatgcttctctatggcatcatcacttcatgccaagaaaaaaaagtgaccatcaaccaagagcaagtgaataagaagaggagcagcttccgcggcgtgcggaggcggccgtgggggaagttcgcggcggagataagagactccacgcggcatggcgtgagggtgtggcttgggacattcgacaacgccgaggccgccgcgctggcgtatgaccaagccgcattctccatgaggggctccggcgcggtgctcaacttccccgtggagaaggtgaaggagtctcttagagacatgaagcttgatggatgctctcccgttgtggccttgaagaggagacactccttggctgctaagaggaagaaggaagatgtccttgttttccatgaccttggggctgattatttggaacacttgttgatgtgctctgatctacctagtacaaccattgtttaatctttcatgacttgccaacaaataagcttcagctattcagatttgttattgcttatttttatttagtgtaatcaataaaattatacttctaagtattacttgcttggttaatatatcctatgtacttttttttagtgaccatggtaattatggtcattgatatttctttcttcttttttttttgtggtgaccatgatggagttatatatcttgctggcacccgtttcttatgttcttttgttcttgtattttatcatttatcatttgttttggtagaaagaacatttgtcataatgtcatgatactgatgatcatataatctatatttgagtttatcttttcgtttttgcactttccctttaagtgcaaaatatgtaatg

SEQ ID NO: 388 - DNA, 845 bp, Glycine max
cgcttatataaaaagcacacgtcatagaaatgttgaacacggcattctcttcctgaaaacacccactaacaagaaagtcacaccgtaccaactcaaccataaatgataaacctctctctcttctcttgttaatcaattagaatcagattctttcttctttctctctccgttttagttgctatggaaaatactaagaagcgagaggtgagggagggtgaagatgatgaagatgaaatgaagatggagaagttttacgcgctgttaaggagcttccgagacgcgcgtgatcggcggcgaagggagttggaaaaagaaaaacacgagagccgccacagctggaagaagatgaagaccaccgccgcaacaaccaaggacaataaatcacaagtttcttttgaatttcaggacttcaccaccgagattcatttcagaaagccacctttgacttttgcaaatccagttgcatcatgtgacactagtatcaaagacgacaacaaaggtaagaagaaggaacaacaggatcttgctctcgacctcaaactcgctctctagtaccaatcatggaccttcaattgtgtatatattgcaatgatgcaattcgcaaatatctacaatttgtcatctatcaagttctttatgtattcccgtcacaaaaaaaagttatttatatgttgacgcatgacttgaccggggaaatggtttccgacgaataacgtacataagtacttttatagcagttcgattaatggtgtcaggttaaagaaaacgtgtctgaaggtgttttttttttaatgtttgaaatgtattttttttagataaataatcatttctgtgtctcaatgtgt

SEQ ID NO: 389 - DNA, 5049 bp, Glycine max
tctatttaaatattgttttaggaaggtaagagcagatgatttacaatcattgtacgccacttataaggataacactgttgagatgtttactttcagcttgcttgatgttatacgagagtcagtgtgagactagagttgcaaatattactaggacatggtatttacatacatgtgtgatttcttcaatctccattttattttattaattgtcgttgtatttatatgcattaaagtgataaaatatgaaggttaagggagttcttatctcagttgttcttcattgttaggtgtttatttgttatttccaaaaagatggacattcactgcaccacaagcgccaaccaacctttgaaacaatttttccccacatgcacattcctttcgtcctggttgtgaagaacaaactgtggatttcgaaccacaacccctacatacagagctttctgcaatcctgctgatgtggaagcatttactgaggagaaaaaacagtctattcttggaaaacatcatgggaagggtgctgaatttggtcgtgctgttaaggagataattgaagtttttgagaaattaaaaaaagagactcagcttgatgaaactggctctggtggtgatgttgctaatgcagatgtttcaaatcctgttaactcatctgccaagtatcagacgaatgctcctgagttggcacacacattaccaatgaattctttaaattctattatcaacaaacatgaggtggtatgtgcagctgaggatgactcagccactgtacttaaagatgaatctcataataaggaggcattgttagggaagcctgctgataagatggctgtggtaaaatctcccaagccagttacttactcttctcgaaaaagatctatgggtgacttgtgtctgcagggctgtgtaacacatagacatacctcagtacggaggtctagaaattcatcacgtgctcaaaactgtgtgttgccttgtaatgatagtggaaagagtgctggtaacccatcaaccactgcagctcagagtgtatgtgcacaaaggaatagaaatgtcaggaaatcacctgatctttctggctgtgataattttgagtcatccacttttgtctcgaatggtagcattgatgacaacagttctgaaattatcacaactgattctgatacatttagcttgaatgagggtagtacaatggattcaaattttaaacttgaactatctgaagctattgaatgtccagaagttgagttgaacaaagggcttaatcttgaaataaaacctgtagttaataagaaaaaaagaaaacccaatagaaagagggcagctaatgatgcttctaagccaatcagtaggccagaggaagagactggtgtgcagaatgccagtcaaagctcacaaaatatgtgtggaaattcaaaagaaagatgctttgaacaagatggagatgaacacttgccccttgtgaaacgagcaagagtcaggatgggtaaatcatccgttgaggcagaacttcatagcactctccaatgtctagaaaaaaattgtaaggaaaatactaactccgtgcagcagatgatcacaccctcaaattgtgagaataatagccctgctgatggagactcatctgtgctgaatggagctttagatgatgtttctccaaaaatttcagttccatgttccaacactcagatttgtaatactaagaaagatcaaaccttcagctctgtggatgttgaagctgctttacctccatctaaacgcctccatcgtgctttagaagccatgtcagctaatgctgctgaaggtcaagcccatttggaagcatcatcctccatgatctcatcaagtggcatgtgctgtatatctgatgtcaagagatgtccgagtatggctattactaatcaacaagagaataaatcacctatccaagtgggtaagcaattgaccatgatacaacatgaaagtgacaaggatgttctcccaggtgctacagatcaagttggtgaagagcttagtgatcatacgatttgtcagacagctaaagtagatttaaaaattcagtcaaatggacaaatttcttctaatcttggttcaaaatgttgttatgttggaagcattcaagattcaccagatccatcattaccagcaaatagtgaagacaacattagaactgtgaatgattccaatacagcatctgatgcatcagaacataatggaataagccttgaccctgtaatttgtgtggacaaaaatgatgccttttcacctcataatgtcgatgtgcttcagaatgagggtgctgtatgtgaggatgcagagtgcttgaagccagctgttgttgagattggcacctcaaatgatatgcgtgatattgtgaaagaggtaaaatgtaaaggtccagagcaggatatgaattctgtctcaacatctgatgactgtttgggtgaaaagggaattttggacattcggtcaagtccatccttgtcagacgggggagattgcgttccacaaagttcgcctcctactacgtctgtttgcaatgtttcgacatcagacagtagtaatatccttcacaatggaagttgtagccctgatgtacatttacaccagaaacaaattgtatgtggtcctgtcgatggtagtaaagatggggatgtggcaattcaacaatcaatatgtatgggtaagtcaactgaagcaggacgtgctgctttgttgtactttgaagcgatgcttgggacattgacaaggacaaaggaaagtattggtcgagcaacacgcatagctattgactgtgcaaagtttggtattgcagataaggtcatggaaattcttgcccattgtcttgaaatggagtctagcgtgcatcggagggtggatttgttttttcttgttgactctattgcacagttttctcgtggtttaaaaggcgatgtatgtggagtatattcatttgctatccaagctgtccttccacgactattatctgctgctgctcctcctggaaatactggccaagaaaaccgtaggcagtgtctcaaggttttaaggctgtggttggagagaagaatcctaccagaatccattattcggcgacatatccgggaactggatttatatagcagttcaggtggtatctacttgcggcgatctatgagaacagagagggctttggatgaccctgttagagaaatggagggcatgcttgttgatgaatatggaagcaactcaacttttcagctgcctggattctgcatgccccaaatgcttaaagatgaagatgatggtgaagggagtgattctgatggcgggaactttgaggctgtcacaccggagcatacttctgaaatatatgaaataacttctgcaattgaaaagcacagacatatcttggaagatgttgatggtgaacttgaaatggaagatgtggctccctccaatgaagttgaaatgaattcaatttgtaatgttgatagagaaaatgctaagcagtgtgagaagaatctgcctctgttctttgctcctctacatcaggatatgcggtcatcttccccacccccactatcattccttcctcctccacccccaccttctattccacaccacatgccatctacctctgatccatataacaccgtagttaattcaaaaggttgtactgtttcacagactctgaaagaaaaccaccacccacttcactctgtggctcagctcatggctgcaccaaggcatagccaacctatctgtgatgcagtgcaccatcaagtccctgaatacagagaaatgcagatgcacatgccagaatctacttgctctttcaacagttttcctgtaccacctccagagaattttcgacatactgatggtgttactacacataataaaggatactctatacgaccacctcaacatgtgccttgcaatcagttttcttttgttaatggggaacagcatgtgaaacatcgaagggaggttccaccaccccttccttactccagtagacaacactttgtgcagaacatagagagagagaacttctataataatcatgagagattaagaccacctccttatgattaccaagagagatggaatggtcctgcaccttatcccggtccttggtatcaggaaaaaggtgtgcctcccccttatggttgtcatccatgtgaatcaagtagaattccagatcatgggtggagatttcctcctcagtctatgaatcagaggaactcaatgccatttagaccaccatttgaagatgcaattccagtttcaaacagaggtccgagcttttggcagcctaggtgatcagaaaatacccagaaaccatggctggtatagcccactttttgggctgggctctggccttgtttaggaaaatgtgatttatggtccttcattctgtacatgcaagaatctttggagggggttcggcggaatctgcacaggacatgtgaatgatctgctaggttttgtacatatgtattttagcctcttctgcagaatgcagggcaggaattgtaattgtagagttgttgaaaaggggtaacctatttaggttgtcatgtgttaaatttttttgctccaaattttataatttatttcatggaagcccttatagaagttagatgaatatatatatacacacaaattttcaggggatgtttcttgaaattgttctcttgatatatggaaaaacttccctctagcattttctttgtcaactctgattcattgtttaaatgcattgtttccacgccgagtgcaaggtctcagtggccattaactattgggttgcttgggggcccatgcataaaaacgtgctggcctatggtagtggtttgttggagtttgtagggagagttggcgtgatcaaccgtgatgccagcgttgagaatcatgaagggtgtatggctggctgtcttaattctgaatttcctgttataacgtgtaataccactgatgttgctttgtattttggataattgtctcttcaatgccaaattaataaataaaaaggggaagaaaacgttgatttttttggagctacgt

SEQ ID NO: 390 - DNA, 781 bp, Glycine max
gaagatccgttaagaaagactgaaaacaagagacgaaagagtgagtgatgataagaaccagacaaccttgttccttagggtttatagcgcggtcttacttcactgaagcagcgtgcattgtgttcgatatcaaaccaattgatgaggaggctgggaagtattcggagctatgcaaagcatcttcgcatagatggggtgaagaacactatagccgttgcctctggcaaaggtggtgtgggcaagtccaccactgctgttaatttggctgttgcacttgcaagaaagtgtcagctcaaggttggtttgcttgatgccgatgtgtatggtcccagcattcccacaatgatgaacatcaatacaaagcctgaagtcactcatgataagaaaatgattcctgttgaaaattatgggatcaaatgtatgtcaatagggttccttgtggagaaggatgccccaattgtctggagaggtcccatggtatcaaatgctcttgagaaaatgacaaggggagttgactggggtaacctggacattctagtgatggatatgcctcctggcactggtgatgtccagatagctatgtctcaaaatctgcaattatcgggtgcactgattgtttcaactcctcaagatgttgcattaatggatgccaggaggggagtaaaaatgttcaataaagttgatgttccggatgctgagaatgaaatccatgatgcctaccattgatatatcaaccattccttcgggtgatatggtgttcacatatcatctaaaagctgtg

SEQ ID NO: 391 - DNA, 2077 bp, Glycine max
aagatttgtagagtattcctgaagcggagcggtgcggtgtcttgtttctgcgaaccatctctttctcttccttccaagttgccaccgagcgctgagccacttcggttttttcactgttgttttagtatccaattccaaatgaatacccaatacgtcaagcaactgctccgtaatttctattctaccaaattttttctcaacagagaaaaaccacattggaactatatgcatagggtttttaaccagcttcaattgcaaaggtcaagagcagacaaggtagaagataagctaaaagaagagcaagaaacacaacagatttctttcaaatctgaagtgaagaaggcggatggaaatgatgggattagcaaatactcttctgatgatgaagattccttggatagtaagtggaagttggagctggcttggcttacaaaagcacttgaaccagctctgcaattttgtaggaaatggaattggaaacaaacccccaccaagcaatcgatcccttacggaaataattgcctgcatccaacgaagcaagattggaatccaggattggagcttgagtgaccttacaattggcttgtatctgatctatcttcgtcaagcttctacacatccatttgaagatatcaaaggcattcagatattgtcagaatccattgttcaagatctcatatatcatattgagttggctaaaggtgcttatagggataacccttttagcctttcaagaaactgcatgctacgagaaagtaatgtcaaaaaatttgttaaatactccagcgtaatgaggcctgcatactatataggggttgatacccgtaaaaagcttgtaattttgggcattcgtggcacacatactttttatgaccttataactgatattctttcctcaagtgatggtgaagtcacctatgaaggctattcaacccactttggcactgctgaatctgcacgttggtttctccgtcatgagattgaaataataagaaaatgcttggagaaacatgcgggatttaagttaagacttgtgggtcattctctgggaggtgctatagcttctttattggcaataatgatccatagaaaatcaccaaaggagctgggttttagccctgacattgtatctgctgttggatatggaactccaccatgtgtctctagagaacttgctgaaagctgctctggctatgtatcgacagttgtgatgcaggatgatattatacctagattgagtgtagcttcccttacaaggctccgaaatgaaattgttcagactgattggatgagtgtaattgagaaagaagactggaaaagtgttacggatttggttacaaatgcaaagcagtttgtgtcttcagtgcaagatgtagctcgcagacttgctgattatgcaaatttcaggagaaacaaaagtttagctggtgtgtgtaaacagttggtactgctgataaggagttgccagttgccactgaagctcctctgccctccaaagctgcaaaggagaattcaggtgtcacgaaagttgagggaactaaacctgcagtgatcgaggagttatttatacctgggactgtttactatcttaagaggaacctggcatcccaaaatgttggaaaggattttttcaccctttacaaaagggagcctggtgagcatttccaaaaggtaatcttttcggggaattttatcacagaccacagatgtgatagccattattatgctttgagagatgtccttaaaggtttgccatggtgtggaaaggaaggtatatttaaatagaaaatgttaattattttaatttaatttttccatatcattttattgtaataaaactgtacattgtgtaactaattttctgtgctttgggggtgccttacagttctttagtctgtgcggaggtgttaacaatagcacagtagattagaagtttggcaattttggctaaatacattaaaaattgtggatagtttggttatatcctaaaaaaagaaaatgctgatttagtcctgtagcaaataatattcgatcattgtttccttaaggactgtcatgctgtagttcatgtttttga

SEQ ID NO: 392 - DNA, 2114 bp, Glycine max
tgggaggaacagaaatgatccaaatatacctcgatgatattaatgaatttgtggcaaccaagattaaaaaatgtccaattccaaataaccgttggaaacagaacatgcatatatatagttaatagtcttctgaatctgatatctttccttacttcctcgtcaacaatcattgttcattcggcgaattatcctattcaaccactcattgcctttcgatctctctctctctcctgcgacacaacatctcattctaaattcccttcaatttcatctctcacacatccatacctcttcaaaccataaaaaaaaattaaaatgattcaccttttcgcgttaataagtcacttcccaaatcgtcaagctattgatggtgtgatgagtctcaactctctagtaaggagcttgttggattgaaaaaggaacttgtgtgggttagcagatggttggttgtgagggactgtggggggttcttatgaagagttctggaactactgagttgaataccttttaccccattaaagcagaatgccaagctgatgttccagccactcgatttaaaccaagggctggcaaaactctaagtcaaagaagatggcaggcatcattctcccaagatggtcacttggatattgcaaaagtgctaagacgaatacagagagggggtgtccatccttcaatcaagggggaagtgtgggagttcttgctaggttgctatgatcctaacagtacacttgaagaacggaatgagctcaagcaacgcaggagggggcagtatgatatgtggaaagctgaatgtcaaaagatggtcccagtcattggtagtggaaaatttattacaacacccctcattgatgatgaaggccagccaatagatccttctatggtaggcgtccagacttcagataagaaagttgtgcagtggatgcaattattacatcagattggtctggatgttcatcgaacagatcgagcacttgaattttatgagactgaagctaatcaagcaaaactcttcgatgttctagcagtttatgcttggttggacaatgatattggttatgtacaaggaatgaatgatatttgctcacctttgattattcttgttgagaatgaagcagattgctactggtgctttgaccgtgcaatgcgaaggatgagagagaacttcaggtgcagtgcaagttcaatgggtgtccaatctcagttggctacactctcacagataatgaaaacagttgatccaaagcttcatcatcaccttgaggatttagatggaggagaatatctctttgcatttcgcatgcttatggttcttttccgaagagaattttcttttgcagatactttgtatctttgggagttgatgtgggccatggaatacaacccatacatcttcacaaaatatgaggatccagatcatgcaaaaacaaaaggccccttgcctccaacaaacgacaaacatttgaagcaatatggaaaatttgagagaaaaaatgtgaagactgggcatacagaggaaaatagtgcactgtctgtttttcttgttgcaagtgttcttgagatcaagaataggcggattttaaatgaggccaagggcgtggacgatgttgtcaagatcttgggagacataacctcaaatcttgatgctaaaaaagcacttaatgaagcactgaaaattcagaaaaaatacctaagcaaggccaagaagggatgacaaagacaacaatagattttctgtaactacatgatggcagctgtgtttgcatgatcttctgaggtttcagttgctcttgacagaccattgttttctttctttcattctttttttttagtctcttagtgatggcaagcagtccctgctctgcctgtgttgaaaatcaaattataatcttatacatgaaaaaaaaaaatacttcgttattgatgtctggagatctagagaaccagaatacgtcagctttcatattgtagaattattttataggtaagaaagatcttctcttcctcaatgagggacatttatgctatcaaatcaaaactgataaaattgtaaagtatttttttaaccgaaggacagttaatgattcaaaatgatatatagtaatgaggtttga

SEQ ID NO: 393 - DNA, 2931 bp, Glycine max
gctctcgtggattcaaaggtggctttgatttgattgctcaaattcagtaatgggtgttgctgttttttgcaccctctgcttttctttctggaaattcaaacggtgagagctttcttttctcttgttttcttttacactctactggtttcacacggttcaagttcaaagtttaaaccttttgctcaactgaattcactagcaaattttgtggaaatgatttgccttttttccctccttcttatgaattttatagttgctgagtcattgtgggtcggtttcaattttgtgaatttggctccattatcctttttctcaattttatttgacatatacaaattttaaaggggtttgcgtcaatacaacagaacgaagatgagggaatctgaatgggtttgactcgaattttactttttagtgaattttgagtgaagaggagaagtatgggaagaagcaggattagagagagagaggaagggaggtgagtttgcagggaagataatgaagtgcctacgctccggggagtcgttgggaggagctgacgatgaagtgttgtttccttcgtcatctggatctcttgcaagtgcaatcaaggacttttcagctagtgaaaattcttgcctggctgaacagtttgataagaagccggacactggcaacatagaagaagctgaatcatccttacgtgagagtggcatcttgaactatgaggaagctagagctctgctaggaagatatgaatatcagaaagggaatatagtagctgctttgcatgtctttgagggaatagatataggtgttgtgactcctaagatcaaaatcgccctttcccgaagcagagaacgccgcaagagacattctcaaaatcatgctgaaccacaaatgtctatacattctgttggcttactattggaagctgtattcctaaaagcaaaatctttgcaggttcttgaaaggtttaaagaggctgcccaatcttgcaaagttattctggatatagtggagtcttcattgcctgaaggcatgcctgataactttggtgctgaatgtaaattgcaggagaccctcaacaaggcagttgagctgcttccagaattatggaaacttgctgattgtccacgtgaagctattttgtcttaccgacgagcactccttcatcattggaatcttgatgcagagactatagcaaagattcagaaagaattcgttgtttttcttctttatagtggaggagaagcaacaccccctaatctccgttcccaaatggatggctcatttgtgcctagaaacaacatagaagaggctatacttcttttaatgattttattaagaaaggtctctctgaatagaatcgagtgggatccttcaattttagaccacctttcatttgctctgtctgtttcaggcgatttgacagctttagccaatcaattggaagaattgcttcctgcgactatccatcgaagtgaaaggtactatgctctagctctttgttattatggagcaggtaaggacttggtagccctggatcttctcagaaagttgttgaggagtagagaggatcaacaccatgttcctggtttgttaatggcttctaagatttgttgtgagaactctactcttgcggaagaaggagtaagctttgctaagcgagtgcttcaaaacttggatggtagatgtaatcagctagaaaatcatgccaatttctttcttggtgtttcactttcagcacattcgaaattggctgcttctgattctgagaggcttaagagacaatctgaggcacttcacgccctagaaactgctggcagaatgagaaacccccttgtactataccatctaagtttagaatacgcagaacaaaggaagttggatgctgcattttattatgcaaagtgctttctaaaactggaaggtggttctaatgttaaaggatggttattgttagcccggatattgtctgctcaaaaacagtttttggatgctgaatctattgtcaatactgctttggatcaaactggaaaatgggatcagggtgatttgttgcgaacaaaagctaaacttcaaattgcacagggccagttaaggaatgccattgagacatatacgcagttacttgctgttcttcaaattcagagtaaaggatttggttctgggaagaagctatataaggacaatagagatcgtgctaggaacttggaagtggaaatatggcatgatattgcttatgtatatatcagtcttttacagtggcacgatgcagaggtgtgtctttcaaaatccgaggccatcaaaccactctctgcttccagatgtcatgcaataggcatagtgtacgaagcaaaaggtcaatacaaagaggctctaaaagcttttggtgatgccttggacattgatcctggccatgtccttagcataatctccactgctgtagttcttaaacgatgcagtaataaatcaaatccagcagttaaaagctttctgatggatgcgctacggcacgacagattcaacgcttctgcttggtataatcttggccttcttcacaaggctgagggtacagcatcatcattagttgaagctgccgaatgttttcaagcagcacactttcttgaagaatctgcacctgttgaacctttcagatgactcattctatgatggctggtatactggtagaagcaaaagagcaagcatgtttcttttagagattaaatagcaaggaattttcctgtgaatccttctgtctcaggatagctaggagagagatattgatcatggtttggaaggctagttcataagaagcaatagtaataaacaaaagaaaaagttggcaaactctacaagcagttttgtgatgcaatgattcatgcttgacgtattcaactattcatgtatactttttcacatgcttctttagaggtcaattcagaaagt

SEQ ID NO: 394 - DNA, 737 bp, Glycine max
ccagatcgccaccacaactacaatataaagcttgaaacctgtgaaactgcaacggctactgcaatatataacttggcacatctgaaacctcaatattaatgaatggcatccaacaggggtcaaggtggaattcagcagctgttggctgctgaacaagaggcacaacggattgtgaatgctgcgaaaaatgaaaaattggctaggttgaagcaagccaaggaagaggctgaaaaggagattgctcaataccgagctcaactagaggctgagtttcaaaagaaagtgtcagacagtactggagattctggagctaatgtcaagcggcttgagcaagagactgatgaaaaaatccagcacctgaaaacggaggctgcaagaatatcggatgatgttgttgccatgcttctcaagcatgtaacaagtgtgaaaaattaggaccctttgatatatattggtgctgaggacttctaaattatgatgattattattccgagtttattttttactctagatattctggtgcgggtgagatccttgttttggttacaatgcttaataccttgctgcactgtactcagtcagaaatgacttcaaatttgttaaaataaacatttcggaattaaaagacaagtgtattttgtgttgctattttaacaagtgtttgaggactagttccgcccctgcatatgaatgtaaagtcgaaatgcatggcatataatactacggctgttgatccc

SEQ ID NO: 395 - DNA, 1682 bp, Glycine max
ctcgctgctattcttcgtcgctgtttgtctttcctctttgttaatataatgggagatgattcttcccctagtttggaaaaattgagggctaactggactccatctcaagaccgatattttctagaacttttgctgtcccatgttcacaaagggaataaaactgggaaagtgtttagcagacaagcctgggtagacatgattaaacaatttaacaccaagtttggtttcaagtatgatgtagaagtgttgaagaaccgtcacaaaagattcaggaagcaatacaatgatatgaaaatgatagttggtcaaaagggatttcagtgggatgggacacaaaacatgatagtagctgatgataaagcatgggatgaatgtataaagttgctgatgggagatacagcctttcgtgttttgatgtagattttgaatacgaagaaaaagatttggatgacaagactatgactagtaaaggagtggatgatcaaactcccccagcagttgttaatcaaggtagaattgactggtctccaatgatggaccaattttttgttgaacttatggtggaccaggtgtgtaaagggaacaagattggcactacattcaggaggaaagcatgggtagacatgacagaatcatttaacaaacgatttttatgtcattatggtagaattgtcttgagaaaccgttttaatgtcctgagaaggcattactgttctataaatgttctccttggcaaagaaggctttatttgggataagacacagcacaaggttgtggctgatgaacaagtatggcgaaaatgcatcagggtacatcacaacttccggctctataaaattaaaagcatgcctttttattccggcatgtgcatagtatgtcgtaatgatgttactgcaggttgcaagtcaaatcttgaaaatgaatcttctgggggcaataactctgtcccagatactcagctacctaatgcagataaaggagcatcaaatcttgaaaaggaatcttcttggggcaataactttgtcccagatactcatccactacctaatgcagataaaggagcatcagatataggtggtgaaaataattttaccagagaaactcagcctctgcctaatgcagataaagaagtgttgcatattggtggtgaggagaactctgcaagagaaactcagtctcttgctattgcagataatcaagcattacaacatgttggaaaaaatgttcctggtcacctaaaaaggcatcaacctaagatgcccccaaccttgaatgagtctaagaaggcaagagagcatatagctgttgcagtaacatcactaacccagaaagcaaagaaagaagataatttttctgtagataatgttatcagggtgcttcaggctataccagacctggatgatgatttaatattagatgcctgtgattttttggaagatgagacaagagggaggatgtttctggcactggctgctcctttgagaaagaaatggttattgagaaagcttcgttcgcagtgattggtgaacctcaggctggttcatttatagtcagacttttcaagttttgttagactgcatgcaaaccaagccataactttatgtgttcacatgtacatatttgaaactagaagaattattttttgtttatctttgtcaacatttatatgacaagagattaaa

SEQ ID NO: 396 - DNA, 1786 bp, Glycine max
gaaatatctatacgcagctcggccggtgcttcccgatttcttctctttttattttaaggcgcaacgctattcttcactcaaacgaactgaaacgacatatcgcagaatcaagggcttagcatgatggattcaaacttaccatttctgcctcctagcaattccgatacaaaaaactcatttcgcaagccttctggtgatgcagctaataggaattatcagcatcggtcacctgttgacagatcaccctctcctgatgcttctaggcatggacatagctcaagtccaaatccagtgagagaaaattctgcaagagtctctcaccattcaaggaagtatgatgacagggaacacgaccaacagtatggaagaaatcactatggcagaagcagtgactctcttagacattctgatagacagtcattcaaaagttcctttggtcactctcggtatgacaagtatgcaaatgaagatagatatcgggagaggctgttgtctcgttctggacatgagtcaagggatgatcatgtgagagaagagagtgatagcaggccaaaaaactaccagtgcagtgtggacaagtattcacatgacaaatatgacaggtctgatcatagaagcaaagaaaaacgtagagatacatactcggagcatcagaaatataaagatatggattcttcatatgaaaaatctgcatctagcaagaggcatgcactgtatgatgaagtggagagggaggggcattcaagggactgggatggtcaaaatgaaagaagagattcccgccgaagttcaggggactacagaagtgaccaaagagatgagtcaggtccacaaagagacagtggtaaatttagtttaaaagaagcttataagagtgaacagaaggagtcaaatgatcaaaaccttccatgggaagaaaaaagaaaacatgatgacactgagattaggaagggcaaagactggaaaactagaaaagcaggcgagcagtgtgctattgaagacaaagaatcttctggaaagaaactaaagttgtttgatcctgacaaggatgacaattatagaaaagatgatgaaagtaagacttcaagttcaaacctttctcacaagagcaaggaagatttatgggctgtcaagtccagtggctttgatggtgacaatgatctagatgcggcgaaaattgcagccatgagagctgctgaattggttaataggaacttagttgggcctggatgcttgactactgaccaaaagaagaaactgttgtggggtggcaaaaagagtacacctactgaagagtctggccatcgatgggataccgggatgttttctgatcgtgagaggcaagagaaattcaacaaactcatgggtatgagaggcgaagcaaaggtggagcagaattccaacaaccaaagcagtaacgaaattctccgtgctgagaagcagaaggaacttcagatggatctagagaaacaatacactgcaggccttcgacgaagagatggccgtacagttggcttagggctttaaccattctccggaaaatttacatcctttgacatttatgtgttaattatcaccccatgtttagggaggagctttttgcttgtttgctgtggacatgcttgggagtttatgaatcttatgttagggacatcaccacttggcatctgtttggagttcctgattttgacagggcgtgttatttctatggaatttcttatcgtgattgtatctaaatttgtttttcatatgcaactggtttagataatttggtatttggttttct

SEQ ID NO: 397 - DNA, 1775 bp, Glycine max
tgagctctcagttaattacactctcagataaaaaataatttcaaaactatctttatataattgtggattgcggtgagctctgcctcctgcctcccaggtgaaaaagaaaacacactgacgaagacagttccttctagaattgatagtatgcctctacacattgcaatgctcccgtggctcgcagtgggtcatgtgaacccttatttggagctgtcaaagattcttgctcaaaagggacactttgttacctttataagcactccaaaaaacattgatggcatgcccaaaatcccggaaaccttacagccatccatcaaattggtgaggctacccttgccacacacagatcatcatcatcatctcccagaagatgctgagagcacaatggacattccctcaaacaaaagctattacctcaagctggcttacgaggctctccaaggccctgtatcggagttgctcaaaacttcaaagcccgattgggttttttacgatttcgcaaccgagtggttaccaccaatagccaagagcctcaacattccctgtgcacactacaacttaaccgcagcgtggaacaaagtgttcattgatccacccaaggattatcaactgaacaactcaattacgcttcaagacatgtgtctccctcccacgtggcttcctttcaccacaaccgttcatctcaggcctcacgaaatcagaagagcaacaagttctatcaaagattcggacacaggacgcatggcaaattttgatctcagaaaggcatattccagctgcgacatgtttcttctcagaacatgcagagaactcgaaggagaatggttggattatcttgctcacaagtacaaggttcctgtggttccggtagggttggttccaccatccattcagataagggatgttgaagaggaagacaataaccctgactgggtcaaaattaaggattggttggacaaacaagagtcatcatccgtggtttatatagggtttgggagcgagttgaggctgagtcagcaggacgtcaccgagttggctcatggtattgagctttctgggttgcgtttcttttgggctttgaggaacctgcagaaagaggatttgccacatgggtttgaggagagaaccaaggaacgtggcattgtttggaagagttgggcaccccagattaagatcttaggccatgcagctattggaggatgcatcactcactgtggtaccaattctctcgttgagatgcttaattttgggcatgtgcttgtgactcttccctatttgctagaccaagctttgttttcgagggtgctagaggaaaagaaagtgggtattgaggtgccaaggagcgagaaagatgggtcctttactcgagacgatgtggccaagacattaaagttggcaatagtagatgaggaagggagtgattataggaagaatgccaaagaaatgggcaaggttttcagttccacggatcttcatagtcgatacattgacgactgcattgttgctcttcaaaagtacaagactcctaattccaactgttaagcacggctattcatgccagcaaggattccactccagtttcttctctgtttttgttttgcaattaagtttttcttttatttctgcaaatgcttgaacttttatccttaaatatttccaatcttcaatcatcatcatgtgtacgtttagttttgtaataaagaaggttatgagtaattacctacccataattgttttttgtgcaattatagatacgacccataccactactacat

SEQ ID NO: 398 - DNA, 1767 bp, Glycine max
agatagagcattaactaattgattgcaacattaattaggtgtcgttccatagcatggctctttcaacctttccaacggtgaacaagtgtacctctattggtagggaacaacacacggtggttgcggacatggatggaactttactcataggtcgaagttctttcccttattttgctttggtggcctttgaggctggtggggttcttaggcttttgttctatgttttggcttcccctattgctgcccttctctattacttcatctctgagtccgcgggcattcaggttctcatctttgcctcaatggctggcattaaagtgtcgagcatagagtcagtggcacgcgctgttcttccaaagttctatgccggtgatgttcaccccgagtcatggcgtgtcttctcgtcatgtgggaagcggtgtgtgctcacggccaatccgagggtgatggtggaacctttcttgaaggagtttttgggagctgacatggttttgggcactgagattgcaagttacaagggaagagcaactgggttggtttgcaagccagggatacttgttgggaagaagaaagctaatgccctaaagaaggcttttggagaggagaaaccagatattgggcttggagatagacaaactgatgctcccttcatggctttgtgcaaggagggttacatagtcccacccaaactcgaggtgaaatccgtgtcaaccgacaagctcccaaagcccataatcttccacgatggaaggctagtacaaaaacccacacccctcatcgccctcctcaccattctttggattcccatagccttccccttagcatgccttcgcattgccgcaggctccctcctcccgatgcacatggtctactacgccttttgggcccttggcgtccacgttataattaagggcactccacccccaaaagtcacaaaatctaaccctaaccctaacaacaacaactctggtgttctctttatctgctcccatcgcaccctcctcgaccccatttttctctcggctgcccttggtcgccctatccctgctgtcacctactccgtctctcggctttctgagatcatctcccccatcaagaccgtccgccttagccgcgatcgtgccaccgatgctgccatgattaagaaactcctccaagaaggagacctagcaatatgccctgaagggacaacttgtagagaaccatttctccttagattctcagctttgttcgccgaactcactgatgaactagtccctgtggccatggtgaaccgcatgagcatgttccatggaacaaccgcacgagggtggaaagggatggatccattttacttcttcatgaaccctagtcctacttatgaggtcacatttttgaacaagttgcccaaagagttgacttgtgcgataggaaagtcaagccatgatgtggccaactatattcaaagggttattgccgcgactttatcttacgagtgcactgggtttacgaggaaggacaagtatagggcacttgcagggaatgatggggttgtggttgagaagggtcatgtgttgaaggctaataaagttatgggttgctgaattttgtactttctttttttttacactcaatttcgtggtttgaaaggtaaaagtaggagatcgaacaatgatattcaatagggtttggtgaaataaatgaaataattgtaggaatataaagttaattgtatgcgaagatgtcaaaaagaagtcattactaaaaaacgcttttaaggaggtttga

SEQ ID NO: 399 - DNA, 2225 bp, Glycine max
gagtccactccacccatttctctctctctcttctcttttcctcttcaacattcttctctctcacaaagcaacaacacaaacaccgagcgaggggaattcaactttcagcaatggcggtttcttcttctgcaacaaaatgggtcctcttcttgcttctggcgctgctcattcgagaagaagccatggccatggctactaccccacagatctctgacctcaggaatgttgaagttgaaagacacaggttgccgagcttgacgaactcgtcaatggtggagagggcaaaagaggctgacaaattaaatgaacaagctgctgtggctaacccagaggaagtggtttcaatggttgagatgagcatccagaacagcacagagagaaggaagttgggatatttctcttgtggaacaggcaacccaattgatgattgctggcgttgtgaccccaactggcaacgcaaccggaagcgtctggcggattgtggcattggttttggccggaatgctatcggtggtcgtgatggaaaattttatgtggtgactgaccccagggatgatgaccctgtgaacccgaaacctggcactcttcgccatgctgtgatccaggacaggcccttgtggattgtgttcaagagggacatggttattcagctgaagcaggagctgatcatgaacagctttaagaccattgatgctagaggagtgaatgtgcacattgctaatggagcatgcatcacaattcagtttgtaaccaatgttatcattcatggcttgcacattcatgattgcaaacctactggaaatgctatggtgagaagctccccaacacattttggttggaggacaatggctgatggagatgctatctccatatttggctcaagccacatttgggttgaccacaactccttgtcacactgtgcggatggccttgtggatgctgtcatgggctcaacagccattactatttccaacaaccacttcacccaccacaatgaggtgattctactaggccacagtgactcttacacaagagacaagctgatgcaagtgaccatcgcatacaaccatttcggagagggacttatccagagaatgccacgttgtagacatggatatttccacgtggtgaacaatgactacactcactgggagatgtatgctattggtggaagtgctaaccccaccatcaacagccagggcaacagatacaatgctcctactaacccttttgccaaggaggtgactaagagagtggaaacagcagaaacccaatggaagggttggaattggaggtcagagggagatttgttactgaatggggcctatttcactccatctggtgctggagcctcagccagctatgctagagcctctagcttaggagcaaaatcttcttccatggttgattccatgacttccaatgctggtgcactaggttgcaaaagaggccgtcagtgctagcatgtattatcaaccatagccatgtgaatgaaagaggccatccattatttttcttttgtgtttgattctcaagtttttaccatattatagtagaaaatcatcatcatcgtatccattgctttctttcctcacacctcgattaccatatcctgcatttttcttgacaagtgtacattaaattacacatgtcaatatggttttatgttgttaccccattgccacattgtgtgttttgttgttggtcaaccttagctgctcgacttgctccaactgaaacaagcaatgcaattgtaggagcaggtgcagaagtgtcatccattgttttcttcccttttcaatttttttcctttttcgttctttggtccttcccagctcatctcatctcatcaacctttgtcccccccccaccaattcatatgcatatttttccaaatgtcaaatcatgtctccttacatattgttcagtctttttcagttttataggatttgaattgaatgagcccaaatatatatatatatatatataaatatatatatgaattttcttttagccccattttgttatttttttactatttgttttgttgagttaattatacaagcaaaagcatgattgtcaaagttgagttatatggaaacactttatcaatgacgattatggaattgtaatagttgtggttttgctttttaactttctcacctttttagccttttttttctttttgcccttgtcaatgcaagtaatctttgatttttttatgc

SEQ ID NO: 400 - DNA, 1295 bp, Glycine max
tttaacattaaatatcaacttttctatgtgtggaacattcacttgcgtgttgattccagggagtttcttattggatgtttgctaattatctcattcttctggctctgcttcttcttcttgtaggttctctctctctctctcgctctgcataagtttcttatcttctggactgcgagaggtgcttgccttagctatatactcattttcgcgtgtttgcttgctctagatctgattagcttttattcgagttctggttccttgtttcgtccctgcataatctgaattcaaatacttgccatcttgttacttgttacgctaccagatctgttttgaattaagagatggggttgtctttcaccaagctttttagccggctctttgccaagaaagagatgcgtattctcatggtaggtcttgatgctgctggtaagactaccatcttgtacaagctcaagctgggagaaattgtcacaaccattcccacaattggatttaatgtggagactgtggaatataagaatattagctttactgtatgggatgtgggtggccaagataagattcgtcctttatggagacactacttccaaaacactcaggggcttatctttgttgtggatagcaatgatcgtgaccgtgttgttgaggctagagatgagctccaccggatgttgaatgaggatgagttgagagatgctgttctcctggtatttgccaacaaacaagatcttccaaatgctatgaatgctgcagaaatcacagacaagcttggtcttcattctcttcgccaacgccactggtatatccagagcacatgtgctacctctggggaaggactatatgaaggactggagtggctctccaacaatatagctaacaaggcttagggacattttgtggaatgccgctatttcttgcttattatattatgaggttgatgggttgctgcttctcttatatagcattataatatatatatatatatatatatatatatatatatatatatatatatatatatatttttttttttttttttactcttttaagtcttttctttttctttatttaggtgtttgatactatatcatagcaatcgtattgaatcctgtagaatttttaaataattaatgaattacaaactatacatgacgcgatcatgcttttcaatccttcatggctgcatcagtcaataatccctaaacctttaaatttaaagcttccattaatcagatgtcccggtggacgctttagaaatttcacttaatatgtagtacagtactttgattatgcgg

SEQ ID NO: 401 - DNA, 2928 bp, Glycine max
atgatggccaagaccacgctagattcgggatggcttgcagctaggtccaccgaggttcatttcacaggcactcaactcaccaccacgcaccctccctctgcctccacccaaccatggatggaagctattgtccctggaactgttcttgctaccttggtgaagaacaaagcggtgcctgatcctttttatggactaggaaatgaggcaatcttggacattgctgactctggaagagaatattacaccttctggttctttacaacctttcagtgtaagctgtcaggcaatcagcactgtgatctgaatttccgaggaatcaattactctgccgatgtctatttaaatgggcacgagatggtcctcccaaaaggaatgtttcggagacattctcttgatgtcactaatattattcattctgatagtagtaacctgcttgctgttcttgttcaccctcctgatcatcctgggagcattcctcctcaggggggacaaggtggtgatcacgagataggaaaggatgtggccacacaatatgttcaaggttgggactggatggctcctataagagataggaatactggaatatgggacgaggtttccatttctattactgggcctgtaaaaataattgatccccacttggtgtcatcattttttgacaattataagagagtatatctacatgccacaactgagttggaaaacaggagctccttgattgctgagtgctctttgagtatccatgtgacaacagaacttgaggggaacattcacttagtagagcagcttcaaactcaaaatctttcaattcctgcaagatcacgggtgcaatatacatttcctgagctcttcttctacaagccgaatttatggtggccaaatggaatggggaagcaatctttgtacaatgttattattaccattgatgtcaaaggacatggtgagtctgattcatggaaccatcactttggattccgcaaaattgaaagccatattgatgttgctactggtggaagattgttcaaagtcaatggagaaccaatttttatacgagggggtaactggatattgtctgatgggctactgcgactttcaaagaagcgatacgaaacagatatcaagtttcatgcggatatgaattttaacatgattcgatgctggggtggtggactcgctgaaaggcccgagttttatcgctgttgtgattattatggtcttttggtatggcaagagttctggattactggggatgttgatggacggggtatcccagtatcaaatccaaatggtccactggaccatgaccttttcttgttttgtgcaagagacacagtcaagcttctcagaaatcatcctagtctcgccctctgggtgggtggaaatgaacaaactccaccagatgatttaaatgttgccctgaaaaatgatctgaaacttcatccttattttggacatgcagaagaaaaagaaaaacctgtaggtgacttgtccccaagattgggggatcctagccaatatcttgatggcacacgaatttacatacaaggatcattatgggatgggtttgcagatggggagggggacttcagtgatggaccttatgaaattcaaaatcccgaagatttctttacggatagtttttataatcatggattcaaccccgaggttggttctgtaggaatgccagttgcttctaccataagagccataatgccttcagaaggatggcaaataccactgtttaacaaacttcccaatggttatgtagaagaagttccaaatcccatatggaaataccataaatatattccttattcaaacccaaccaagaaggttcatgatcaaattcagctgtatggtgatgtaaaagatcttgatgatttttgtttgaaggctcaactagttaactacatacaatatagagctcttctggagggatggacttcgcgcatgtggaaaaaatatacaggagtattgatttggaagacacaaaatccttggactggtctgagaggtcaattttatgatcatcttcttgaccaaacagcaggtttctatggctgtcgatgtgctgcagagccaattcatgtacagcttaatctggctacatattttatagaggttgttaatactacatccgaagaattgtctaatttagctatggaagtttcagtgtgggacctcgaaggcacatgtccacactacaaagttcatgaaaatctcactgcgctgccaaaaaaagtaacacctattgttgacatgaagtatctgaagtcaaaaaatcctaagccagtctactttcttcttctcaaactctacaaaatgtcagataatacaattttatctagaaacttttattggttgcatcttcctggtggagattacaagctattagagccgtataggaagaagaaaatacctctcaagataacatccgaagttttcattgaaggatccacttatatacttcaaatgcatgtgcaaaacacatctaaaaaaccagactctaaaagtttaacaatggtacacagttcaacagctagacaaagcagtggctgctttgttacagactctctggaaaccgtagatagtgggactggaaaagagcatgaagttggttggtttaaggggatacacaaatgctttgctgggaaaagtcatggtttgaaggtttctgaaattaacggacaagatacaggtgttgctttctttcttcatttttctgttcatgcttcaaataaggaccacaaggagggggaagacacaagaattcttcctattcattactcagataactatttttcacttgtgccaggagagaccatgactattaaaatatcttttgaggtcccttctggtgtctctccatgtgttactctgcgtggctggaattaccagggacaaaccatccatgaagctctttactga

SEQ ID NO: 402 - DNA, 5772 bp, Glycine max
tctcccgagcacaagatctacgtccccgtgtggtgaaacttcacaacaaccgatcacagtgagtgacaagagtcttcacactccatcgactcaattccgagatggctttcatggcggtcttggaatccgaccttcgcgctctctccgccgaagctcgccgtcgctatcccgctgttaaagacggcgcagagcacgccatcctcaagcttcgtacattgtcaagtcctagtgaaattgcacacaatgatgacatattacgaatctttttgatggcgtgcgaggtgcggacggtgaagcttagcattattggactttcgtgtctgcagaaactgatatctcatgatgctgtttctccatccgctctgacggagattttatctacactgaaagatcatgctgaaatggtggatgagggtgttcagctcaagacccttcaaacaatatcaataatatttcaatcacgtttgcaccctgaaaacgaggataccatgtctcaagctcttggcatctgtctcaggcttcttgaaaacactcgatcttctgatagtgtgcggaatactgcagcagctaccttcaggcaagcagtggccttgatttttgatcatgtagttttggctgagtctcttccaactggcaaatttggttttggaggtcagctctctcggacaaattcagttactggtgatgttaaccgtagcatcaatttgtctgaatcattagatcatgagtccgtttctggaagaccccctgtgatgagggagactttaactgaaactggaaaacttggactgcgcttgcttgaagacctgacatctcttgccgcaggtggatctgcaatttggttacgtgtcaatattcttcagaggacatttgcacttgatattcttgagttcattttgtccaattatgtggctgtcttcagaacattgttaccctatgaacaggctttacgacggcaaatttgttcacttcttatgacttcacttcgtaccaatgctgagcttgaaggagaaactggtgaacctagctttcgtcgtttggtcttgcgttcagttgctcatattataagactttacagttcttcccttataactgaatgtgaggtttttcttagtatgttactgaaggttacttttcttgatttgccattatggcatcgcattcttgttcttgagattttgagggggttttgtgttgaggcacggacattgcggattcttttccaaaattttgatatgcaccccaagaatacaaatgttgtggagggaatggtcaaagctcttgctagggttgtttcaaatgtacaggttcaagaatcaagtgaggagagcctggcagctgttgctggaatgtttagtagcaaagccaaaggtattgaatggagtctagataatgatgcatctaatgctgcagttttggttgccagtgaagcacatgccataactttggcagttgaaggcctattaggggttgtcttcactgttgcaactttaacagatgcagccatagatgttggagagcttgagtcccctagatgtgataatgacccacctgtgaaatggactggtaaaactgcagttctctgcatctcaatggttgactcactgtggttgacgatacttgatgcattatcccttattctatcaaggtcacaaggagaggccattgtgttggaaatattaaagggataccaggcatttactcaggcgtgtgggattctccgagccgtagaacctttaaactccttccttgcatccctttgtaaatttaccatcaattttcctgttgaaacagaaaaaaggagtgctttgccgtctcctgtatcgaaacggtcagaactatcagttgaccagagggatagcattgtgctcactcccaagaatgtgcaggcattgagaacccttttcaacatcgctcatcgattgcataatgttctgggcccatcctgggttctggtgttggaaactctggcagctttagatcgagcaattcattctccacatgccactactcaggaggtctctacccctgtcccaaagttcacaagggagttatctacccaatccagtgacttcaatatactctcttctttgaactctcagctctttgagagctctgctctgatgcatatatctgctgtaaagtctctcctctctgcattatgccaactttcacatcaatgcatgacttcaagcagtttgggaccaacaactagtcaaaaaattggaagcataagcttttcagtggaaagaatgatatccatccttgtgaataatgttcacagagttgagccattttgggatcaagttattagtcactttcttgagctagctgataattctaatccacatttgaaaaacatggcacttgatgcacttgatcagtctatatctgctgtcttaggttctgaccggttccaagactacaaactatccaagtctcttgaaccatcacaggaaatggaagtcaatcttgataagttgatgtctcttgaatgttctatcatatctccactaaaggtgctttatttttctactcaaagtgtagatgttcgtattggatctttgaaaattcttttgcatgtcttagagagatatggagagaaacttcattacagctggcctaatatacttgaaatgttgaggtatgtagcagatgtttcagagaaggatcttgttactcttggcttccagaacctaagagtgataatgaacgatggactgtctgctttacctacagactgccttcaagtatgtgttgatgtgactggagcatacagtgctcagaagactgagttgaacataagcttgacagcagttggacttctgtggactatgactgatttcattgcaaagggccttctcaatggaccttttgaagaaaaggaagcaggtgttggttccacagtgaagcagatagaccgcaaaaagatggaggatcaaacacgtatttcttataatgtgagagaccaggcttctgtagatggtgttgattttgagaagcttctattctctgttttctcattacttcaaaaccttggggcagatgagagaccagaggtgaggaattctgctgtcaggacactgttccaaactttaggaacgcatgggcaaaagctttcaaagagcatgtgggaagattgcctttggaattatgtatttcctacattggatcgtgcttctcatatggttgctacatcatcaaaagatgaatggcaagggaaagaacttggaactcgaggaggaaaagcagttcacatgctcatacatcatagtcgtaacacggctcagaagcagtgggatgaaactcttgtgcttgttttgggtggaattgcacgtatattacggttgttctttccttttttcacgagcttaagtaacttctggtctggctgggaatcattgcttcaatttgttgagaatagcattttaaatggtagtaaagaggtagcacttgcagcaataaattgtttgcagacaactgttaactctcattcatctaagggaaatatgccaatgccttaccttatttcagtaattgatgtttacgagcttgttctgagaaagccttctagttaccgtggcaatgctgctgataaagtgacgcaggagattttgcatggtcttggagagctttacgtgcaggctcaaggattgttcaatgatgtcatatacacacaactaatagcaataatagatttggctgtgaagcaagccatgttaactaatgataactttgaaatggaattcgggaatgtcccaccagtgctacggactatattggaaatcttaccgctgttacgtccaacagagcacatatcttctacgtggcctgttcttcttcgagagtttctgaagtatcttcctagacaggattctcatttacagaatgaggatggtaaaatcgatcaagcaagagattctcaggtgaactatgatgcacctaatggtgctactccaatatcacccaacaaaatagcagtatccccgggttctggatcaactgcagccattcctagttacatatttgcagaaaagctagttcccgtgctagtagatcttttcttgcaggcacctgctgttgaaaagtatattatataccctgaaattattcaaagccttggaaggtgtatgacaacaagaagagacaatccagataatgcactttggaggttagctgttgaagcattcaatcgtgttcttgttcactatgtcaccaaattaaccaatggaggtccagattcaacgattagcaaacctgtcagaacacgaatatggaaagaaattgcagatgtttatgaaatattcctaattggatattgtggacgagctcttccttcaaattccatctcagcagtggtgctagaggctgatgagtcccttgagatgtccatattaaatattcttggtgacacaatccttaagttgccagttgacactccttcggatattctgcagcgactggtctccacattggaccgttgtgcatcacgcacatgctcattacctgttgagactgtagagcttatgcctcctcactgcagcagattttccttgacttgtttacagaagttattttctttgagcagttattctaatgaagtcaattggaatatgacaagatctgaagtcagcaaaatctcaattacagtgctcatgaccagatgtgaatacatcttgagcaggtttctgacagatgaaaatggcttaggtgactgtccattaccaaaagcaagacttgaagaaattatttatgttctccaagaactggcgcatcttgtaattcatccagatgcagcatccagtctccctttacacccattgttgagaactgaactagcaagggaaaaggagaagcatgacaaccgtccccatctgtttgcgctattaccttccttttgtgagcttgttacatcaagagaattaagaatacgggagctggtgcaagtactgcttcgattagtcaccaaggaattgtctctggaaaagctcagcttggcgagtgaaaagaatacttccagataagcccatttaataagttgtttgcttcgaaatttttaagctgatgaaatacctagcttttcttcttttacccttgtctaggattgtatattttttttttttctgtagactagactagaaccacctgtaggaggttttcccagtcttttctctgttgcctgtcataaattatggtcatccatactttctcagctccatcagctacatgcccatgattggcctacctcaagttacgacagatcaaagttttccagtagtccattgttaaaccgtttgaggttctccaacccaatacaatttatttggggcaaaacttggagagccataaatctgggaaaaacaatggagcacctgacagaattgtgtggtttaccagatattctaaagacaggaaccgctaaggaagaggaagaaatctgttaaaatggtcctagtaagaggatcaatatgccccttgcattgccaattttgttgtaccaaatcacactgaaatgagtctgactttgagcccaatttttttaaactcgggcccaggccttatttttgtttgtttgttagtgctaaccttcttggtcctttaaatgctcaatgtatgtattaatatcttattgattggagactgagaaacaaacgggcattatatttcggaattcttgaattagatttgaacatgtcccctggagaagaaatagtctcaattccatccccgttcctaaatgttgttaattgagaaaattattgtaggatgagc

SEQ ID NO: 403 - DNA, 972 bp, Glycine max
atggagtcacagtgtgcaatcaagaaagatgccactgaattgataggtaataccccaatggtatacctgaacaacatagtggaggggtgtatggcccgcattgctgctaagttagagtccatgcaaccttgcttcagtatcaaagataggacagcatttagcatgatcaaagatgctgaggataaaggcctcattacaccgggaaagagtgttcttgttgaggctacaagtgggaacacgggcattggaatggcattcgtagcaacattgaaggggtataaagtcatagtggctatgccagcttctgtgagtcttgagagaaaaattgtacttcgagcctttggagctgaagtctatctcactgaccctgccaaaggaaccgatgcagttcttaggaaggccgaggagatagtgaataacacgcccggaagttacatgctccgccagatagataatcctgctaatccaaaaattcattacgagaccactggtcctgagatttggagagactccggagggaaagttgatgctttggttgcaggggtaggaaccgggggtaccataacgggtgctggcagattcctcaaggagagaaaccccaatgtcaagctgtacggcatagaaccagttgaaagtgcagtcctcagtggaggaccgccaggtgatcacctaatccaagggattggtaatggtctcattccaagtgtactggattttaatctcctagatgaagttattcagatatcaagtgaagaagctatagaaactgctaagcttcttgctttaaaagaaggtttgttgatgggaatttcatcaggagccgcagctgcagctgccataaaattggggaagagaccagaaaatgccggaaaactcatcgttgtggtatttcctagttacggggagcgttatttatcttcaccattgtttgaatccattcggcatgaagctgaacagatgacatttgattaa

SEQ ID NO: 404 - DNA, 1688 bp, Glycine max
tttcatcgcacaccatcatcacgttcttgttgttcctttctcaaccactgaaaccaagtaatatacaaaatgctttaaaaggaaaaccagacagagtttgatttctgtacttcatggcttgtcttgcatcattgcatgcgtcatgtccttactatagtgtctttaactgtggtttttcattcttaacttgagagagagagagagagagagagtaactagcttttccgaaaataggaaattggacagcaatttgactccgagaacagcctatcgtttcaagagaagatggtaactagaattgtggatcttcgttcagacacagttacaaagccaactgaagcaatgagagctgctatggcaagtgctgaagttgatgacgatgttctaggctatgatccaactgcttttcgcttagaaacagagatggcaaagacaatgggcaaagaagctgctctttttgttccatctggcactatggggaaccttgtatctgtacttgttcattgtgatgtcaggggaagtgaggttattcttggagacaattgccatatcaacatttttgagaatggaggcattgcaaccattgggggagtgcatccaagacaagtgaaaaataacgatgatggaaccatagacattgatttgattgaggctgctataagggacccaatgggggagctattctatccaaccaccaagcttatttgcttggaaaacactcatgcaaactctggtggcagatgcctctcagttgaatatacagacagagttggagagttagctaagaagcatggactgaagcttcacattgatggggcccgtatttttaacgcatcagttgcacttggtgttccagtggataggcttgtccaggcggctgattcagtttccgtttgcctatctaaaggtataggtgctccagttggatctgttattgttggttccaagaattttattgccaaggctagacgactccggaaaaccttaggaggtggaatgagacagattggcctcctttgtgccgctgcacttgttgccttgcaggaaaatgttgggaagctggaaagtgatcacaagaaagctagacttttggctgatggattaaaagaagttaaaggactgagagtggatgctggttctgtggagaccaatatggtatttattgacattgaagagggtacaaagactagggcagaaaagatatgcaagtacatggaagaacgtggtatccttgtgatgcaagagagttcatcaagaatgagagttgttctccaccaccaaatatcagcaagtgatgtgcaatatgcattgtcgtgctttcagcaagctctagctgtcaagggagtacaaaatgaaatgggcaactagtggaagaatttgaatatggcacgttgctgccatattagtcattaaaaaggaattccgtgttccatttgcctttgctcatttgattttcttaaatgtaccctaaagaacatgcaaagatttacatctttgatgttgttccctgttatgaattatgttgactatcatcgtcgttcccctgctaatttagctcattgtttactgtcccattattaggcatgttaggcatgtataggatattgtgcaacgttagcaatatatttttaatatatcttttatcaattaggtaaatttgatattggtcctgctaaaaaatgagctta

SEQ ID NO: 405 - DNA, 3367 bp, Glycine max
ggttaaaccaaaaactaaaactaatttccaatccaaacgaaaaccaatcctatgaatgaatcctacgaccgaagacccacaccaaagttttcttctagtttctatccttcttcatttcataaccatcacattcatcactctcctctttctttcatttctttcacacccttcttttgttttcttctgtttttaatttttttcccctgttcttctgtttctctcttctctttagggtttcaaagtctaccattccttcttcccttccaattaccataccaatttaaaccctcctttcattcgatttcctcacctcgattcccagttttctcgctctagatttctgatgccgcagcaatttcaatctgattgccgtctgcgagggctggaatcggttgtggacagcttagaatcacttttttttttcttattctttttcattttttgacgaaagaggaggtgcagttgtgggagtgtttcgtggttcagtagtgagtggcttctgaagattatgattatgatttagaagtaaccctaggtatctgtgtaggttcatggtatttggtgattgatttgggagtgtgattttgattccctatagttttttttttttgctttggtttttttgggggagtgattactgattggagaagaaggggatggagaatggtcacgatgggaaattgactgagaaattctcgggcttgaatatcaaccagcacggtcagcaacacgagcatgatcaatctaacctctcttctaacaacaatgataacttgtatcaggtcatgaaggctgttgaagctgccgaggccactattaagcaacaggtagaagagaatagccggcttaggtctgaacttctgagcaaaattcaggaactggaaaaatataggcacgaagattcagtggatcaaaaatcacatttggttgctcaatggaaggagcaggagcacggatcttatgaagctcgtcaatcagctccatctatagccagaagcaatacaggtggccattctgagaacagtcaaataaatggaacattgagagtacagccaaacgaccagttgcctatggataatactggctactctcagttgtcttcaccatctacaaggtcaatctctccaagcaggcatctactagaaggagtccttgattcccgatttaattcgcctcggcaaggtttgatgccaggggctgaaacgaataataataataatagcttattgaagcaggttcgggaacatgaagaagagatcatcctattaaggaaacatctttctgattattctgtaaaggaagcacaaatacgcaacgaaaaatatgtcttggaaaagcgcattgcatatatgcgtctggcctttgatcagcagcaacaggaccttgtagatgctgcatcaaaagctttatcataccgacaagacataattgaagaaaatatacgtcttacatatgcattacaggatgcacagcaagaaagatcaacatttgtttcatctttgctgcctcttcttgcagaatactccctgcagcctcctgttcctgatgcacaatcaattgttagcaatgtcaaggttttgtttaaacatttacaggaaaaacttcttctcactgagtcaaagctaaaggagtcacaatatcaattgacaccttggcgttcagatacgaaccacgctaatgttgccacacaatcacaacctcactcgattggtgcacctttggcaacttcaaataaaaatggccttgaactggtacctcagcatatgtactctcaagtaaagcctcaggtctctgttgatgctcaggcaggcactgattggggtctattgggtcgcaaccagaatggcttgagtggtggtgtggcaacaagtgttgatactgatgatttgggtagattttcacctcttgcaagcaggaattcatcagcccatgatgcatccacccacctggtagttactcagggtgatactcgtcctgctcattatggagacgaagtgactaacaaacaggtcacatttcgtgtccccgtgagcaacaatgaagttgatgatcctgatggagatggaacacatagtatgagagaaacatctgctaactggagttctggcaaccctccttatacaaccactgttgatgatcccagttcttcatattctccttatttaccagcagttcttgaagaaccttcttcttcattttctgaggctgcagatgaagatccattgccggctatagagggtctccaaatttcaggagaagcctttcctggaagggaacttaaggcaggcggatactccatcaatggcactactagttgtaattttgagtggattcggcatttggaagacggttcctttaattatattgatggggcaaagcaaccaatctatcttgtcaatgctgatgatgttggtacattacttgccattgaagtccaacctctggataacaggaagcgcaagggagaacctgtgaaggtttttgccaatgataataaaaagattgcttgtgatcccgaaatgcagaaccacatagagaaggcttttaatagtggacatgcttcatatagagtttctctttcgactggatatcttgatatatgggaaccagcgacattgaccattaagagggaaggttatagtatcaaatgcagtggaccaaatggatttgtaatcacagaaaaattttcaccgtccaccactgttatgattccatatggacatacttcagagtttattataattggttccagtggtgctgaacaccttttaaaagcagaaaacaacacagatttcagtggtgctagagacactattgtgctcactttgagattattcatccggaggaggcagcctgggaaaaggagagtaaagaaaaagggattattcttttaacagttgagagggaatgtcaggtgcttggcagaaaatctctgctgtgcgtggaaagtgcggaccgagatggggattgggagttgttgtgtgctacctaaattttgctccttttcatattctataatagggcagaattagcttgagctgtaattgtgaatttatgcaatcatttttttcttctttttctttttcaatatttagcaattcttttttagctcttttccttgccatgtaagtccattgttgtactgcatgttgctcttgtcattttgtgcatctctttgggtgggcccttttgcaatgtgcatgtattcacatgctatgtccgcccactttcattaactaaaatggttcagaggaaaatgatatagttgtcgtttgaatttcgcggaacatgtcccctatgtcaatggtcaaatggtcatgtgtttattttaaacaaataaattggttactttgtccaaggggtgtta

SEQ ID NO: 406 - DNA, 3251 bp, Glycine max
ttttttctcttctgtcgttctggatttgaattgcattaattaactggttcggttaattttctggttatttcttattcattatttaattttccaacacttgttttcttttgatcactttgtttatagctgagttcagctttatcaagttttttctaagtgttggtttatgcttttcttctaccatttgcatgcatttagctgtttcctctagaatctggatatctggtttcttctttctgacatcatcattccactcggtttcatcatttagagtgagtcagcactcagcatagctgccaagaatagcagtggtgttttcttgtgaagatggtactgggattaagatcaaagagtagaaaacgtgtttcaatccaagttcactacatcatccatgttctggagatcaagccgtggccaccttcacaatcactgagatctgttcaatcagtatttctgcaatgggaaaatggtgataaaaattctgggtctctgccatccactgctggcaatgggaaaattgaatttaatgaatctttcaggctttcagtgcttatgtgtagagaagcatccaagaaaggcaaacaccctgaaagtttccagaagaactgcttagagttttacttgtatgacaagacagtaaagagtcaactgttgggatctgccatagtaaaccttgcagattttggaattattaaggaaactaaagccttaagcattgtgtttaactgcaagaagagtttcaggaattcttcacaaccatttctttatgttactattcagccatttgatatagagagttccagctcatcaccaagcagcagcttatcaaaagaattgtcactagagaaggaaggaagcgaatctgtatcacagtcactaaaagatgatgacgatcttgaaattgcctcttttactgatgatgacagtgatgacatcccttcaaatacctcccaaactagcagatctgcttcagagattactggagacagcaccaaaatcagcagaggaagagaaggatctcatggagaatttgttctaccctcggaaagtactactgctagcttaaatggaaacacagagggtgaaccatccacacaattcagtggcatcaattctccctcttcgtctacagttctgagctcagatgtgggaattgctgcccatggaaggcctttattacctaaaatctccgaggaaattgttaaacttgctgatgcaagttctgaaattcaaaaaagcattcaacaatattctccttcatacatttcatcaagtatgaaacccaactttgaaagatctttacagcctcaagtgactcaagaggatagcatgactcaagaagatggcacaagagatcagagatttaataaagattctctggagaaagttagtaatgtttctaaaactggagttctggatgacaaagagaaaatgaaggagggaaggaaaggacaagaacagtttactatgaggaatgaacttttagaaaatgagctcgttaagaattcatctgatgatggttctataaagaaagggaaattcaatagtactactcttctgctaaacaagaaaacacatgaacatccaatgagtattttgatgaatgataaaacagaggatgtgacaaatgtgaagtctcctccacaatcttctgagaactatgggatgttcatcagcaatcagaactttgaaagatctttacagtctcaagtgactcaagaggatagcatgactcaagaagatggcacaagagatcggagatttaataatgattctctggaaaaagttagcagtgtttctaaaactggagttatggatgacaaagagaaaatgaagaagggaaggaaaggacaagaacagtttactatgaggaatgaacttttagagaatgagctcgttagtaatttatctgacgatggttctacaaagaaagggaaattcaatagtactacttttctgctaaacaagaaaacacatgaacatccaacaagtattttgattgatgataaaacagtggacgtgacaaatgtaaagtctcctccacaatctgctgagaactatgggatgttcagcagcaatcagacccatattcaggcagaggaaattaataccacaaatgatgttcatgttggtacttcttgccatgaagatgttaatgtgaatggaagctttcttaacaatgaaactgaattgaaggctgaagttgaaatgcttcaagaagagctaagggaagctgctgctcttgaagtttcaatgtactcagttattgctgaacatggtagctcatcaaacaaggtccatgcacctgctcgacgcctttctagattctatttccatgcttgtagagttgggtccccagatacaatggctagtgcagcccagagtgctgtctcaggatttgttttggtttctaaggcatgtggaaatgatgttccaaggttgacattttggttctcaaatttaatattgctgagagcaattgtgagcaaagaagttgaacgtgatggaaatggtaacactcttcacaaagaagaaaaaccttttcatagctgggaggatccagaaacatttttagttgcattggaaaaggttgaagcatggatattctctcgaattgttgagtctgtgtggtggcagactcttacaccatatatgcaatctgcagctgctaagagctctagctctaggaaagcctatgagaaaagatatcgtgttggtgatcaagatcagggaaatttttctattgatttatggaaaagagctttcaaggatgcatgtgaaaggatttgccctcttcgagctggagggcatgagtgcggctgcttgcctgtgatagctagattggtgatggagcagttggttagtagacttgatgtggcaatgttcaatgctattcttcgtgaatccgctgaagagatgcccatggatcctatatctgaccccattagtgattctaaggttcttcctattccagctggaaaatcaggctttggggctggtgcacaactgaagaatgctaaatgagcatgctgaggtgaatgagtgcgtacacaagaaaagagagtaggaatgaatgtatgtatccatgagtgttataatagcatcaactgaagagaagatgatggaaactcgcttagtttgatcttgtgagaagaagaccagtagaggcttcagtgagaaaagtgaatcaaatggaagttagtccaatcaaaaaaggtggagaaagacctaagaaaacttgagaaaccatc

SEQ ID NO: 407 - DNA, 933 bp, Glycine max
ataagtcaggatggcagaggtgaagcttcatggattttggtatagtccctacactttgagggtggtatggaccttaaagttaaaggatataccatatcaaaacatagaagaagaccgctacaataagagtcttcaacttcttgaatacaacccagtatacaagaaaactccagtgcttgtccataatggaaaacccttatgtgagtccatgcttattgttgaatacattgatgagatttggtcacataattcattacttcctgctgatccctacgagagagctctggcaaggttttgggttaaatatgctgatgatgacatgttttctgcagttattgcattcttccttagcaataatgatgaagagcgagaaaagagcatagagaagatatgggagcatctcagggttgttgagaatcagtgttttggtgatcagaagaaattttttgggggagacattattaacattatggacatagcttttgggtccatattcaaaattcttgtggttgcagaagatattcttgacgcgaaggtcctggaagatgagaaattccctcacttgcattcatggtataataatttcaaggatgttgcagttattaaagaaaacctcccagaccatgagaaaatggtggcttttgctaagtttattagagaaaaacgtttggcatgtacctaagaaagtaatcttatatgagatcaagtatgaatcactttgtatctgtctgaatcgttttgttatgcgtgtttctttagtttccactccattattaggatgtcttgacatatctgtgaaagcaataaaagtttaatgggatgtactggattagaattttagaaggattttaaaagaatttttttataaaagaatttcttgtaatatttttttaggatttttaaataatataaataagctttatcatatttaat

SEQ ID NO: 408 - DNA, 735 bp, Glycine max
atggcctcattgggtgggttacaaaatctaagcggcatcaattttcttatcaaaaaagagggtccaaaagtcaatgcgaagttcgagctgaagccgccaccatatccactgaatggtttggagccggtgatgagccagcagacacttgagtttcattgggggaaacaccacaagacatatgtggaaaatctgaaaaaacaaattgttgggacagagcttgatgggaaatcactagaagagattatagtgacatcatataataagggtgacattcttccagctttcaacaatgcagcacaggtatggaaccatgacttcttctgggagtgcatgaaaccaggtggaggtggaaagccatccggggagcttctagaactgattgaaagagactttggctcatttgaaaaattccttgatgagtttaaggctgctgctgcaacacaatttggttcaggatgggcttggcttgcatatagagcaagcaaatttgatggggaaaatgcagcaaatcctccttcaccagatgaggacaacaagctagtggtgctcaagagtcccaatgctgtgaacccccttgtttggggaggctattatccacttcttaccattgatgtttgggagcatgcttactaccttgattttcagaaccggcgccctgattatatatcagtgttcatggataagcttgtttcctgggatgcagtgagttctagacttgaacaagcaaggctttaa

SEQ ID NO: 409 - DNA, 1581 bp, Glycine max
atgcattccagccctttgcttcttgaggaacccattaggatggcatccattcttgagccatccaagcctactttctttccagctatgacaaaaattgttggcacacttggtctaaagtcacgatcagttgatacaatttcccgttgccttgatgcaggaatgtctgtggcaaggtttgacttctcatggggtgatccagaataccatcaagagacattggaaaatttgagagttgctatcaaaagtaccaagaaactctgtgcggttatgctagatactgtgggtcctgaattacagattgagaataagacagatcacccaatcacccttgaagcagacacattagttgtcttaactccagatcaaaccaaagaagctggttcaaatctcttaccagtaaattttaacggactatcaaaggctgtgaagaagggtgatactatttttatcggaaaatacctgtttactggaagtgaaacagcttccttatggctggaggtcagtgaggtgaaaggtgaggatgtcacctgtctggtaaaaaacactgctacactgtctggatcattgtttactgcacatgtctctcagatccacatcgatcttcctactcttgctgataaagataaggaggtaataagcacatggggtgttcgaaacaatattgacttcctttcattatatacccggcacgttgaagatattcgtcatgcgcgtgaatttctttctaaattgggtgaccttaagcagacacatatttatgcaaagattgaaaatatagagggactgaagcattttgatgaaatattgagagaagcagatggcatcatcctcgctcgtggaaatttagggatagaactcccacctgagaaggttttcttattccaaaaggctgctatttacaagtgcaacatggttggaaagccagttgttgttacacgtgttgtagactctatgactgataatctaagacctactcgtgctgaagcaacagatgttgccaatgcagtgctggatggaagtgatgcaattctccttggagcagagaccctgcggggacaataccctgtagagaccatttctatagttggaaaaatatgtgctgaggcagagaaagttcataatcaagatttgtattttaagaaggctgtcaaatatgtgggagagccaatgagccatttggaatcaattgcttcctctgcggttcgagcagctatcaaggttaaagcctctgttattatttgcttcacttcatctggaagagctgcaagattgattgctaagtacagaccaattatgcctgtcatatccgttgtcattcctcaactgaagacaaatcaactccgatggacattcaccggtgcttttgaggctaggcaatctcttattgtgaggggtctttttcctatgctggcagatccacgacacccggctgagtctaaaagtggaacaaatgaatcaattttgaaggttgctttagatcatggcaaggcttttggcatcataaagccacatgaccgagttgttgtctgccagaaagtagctgactcgtcagttgtgaagattcttgagctcgaagattga

SEQ ID NO: 410 - DNA, 5310 bp, Glycine max
acgaaaaccaccgttctctttctctctccaaaaattatacggtgggtttgaacttcgaactatgaagggcgaaatcatgcacagtaccatgcagttacagggtttttgaaaatctcaatggacactaccgctgcacgtgattgagtagaattagcctcctgctccaacttgcattgctgtttcaaatcttcaattttccttttttattttttactttcatgtaatgggtagtgttgaaatccccaattggctgaaagggttgcccctggctccggaatttcgccctacagacactgaatttgccgacccaattgcttatatttcgaagattgagaaggaagctgccaactttgggatttgtaagattatcccaccgtttcccaaaccttcaaaaaaatacgttttttccaatttgaataggtcactcttgaagtgccctgattttggtccagataatagttcattaggtgtttgtaattcatcgaaaaccagttctggggatggtagtagtgacggggtgttgcgagccgtgtttactacaaggcatcaagaactggggcagagtcagagtgtgaaaaaagccaaagggacagttcagaatccactgtcaggtgttcataagcaagtatggcaaagtggggaggcttatactctggagcagtttgagtctaaatcgaagtcttttgcgaaaagtgtgctaggatcggtgaaggatgtttctcctctggttatagagtctatgttttggaaggcaactttagagaagcctatatatgtagagtatgcaaatgacgttcctgggtctgcttttgaagagtccaagggtcaatttcattatagtcatagaaggcaaaggaaaaggacttattataagagtaggctagatagctctgattgtaaacaaactgaaacgggttgcgtaagagatacccaaaccgatgagaccaaggttgcttctgtccaaagtcattcggacacatgtttgcagatggccaaatcaagtacaactgtgtcaacattttcatcaaatgatgattcacaatcttctaaggaaaagagttcagatgccagcaatgaaatgcaaggcactgctggttggaagctttcaaacagtccttggaacttgcaagttattgcacgctcgtctggctcactaacacgttttatgcctgatgatattcctggtgtcacgtcacctatggtatacattggtatgctgttcagttggtttgcttggcatgtagaggatcatgagcttcacagcatgaattttcttcacactggctcatcaaagacctggtatgctgttcctggagattatgcctttgcttttgaggaagtcatccgcactgagggttatagtggtaacattgatcacttagctgctttgaaacttttgggtgagaaaacgactcttttatcacctgaggtaattgttgcatctgggattccttgttgcaggttaactcagcaccctggtgaatttgttgtgacttttccaagagcttatcatgtaggattcagccatggttttaactgtggggaagctgctaactttggaactccacaatggcttagagtagctaaggaagctgcagtacgcagagctgcaatgaactatcttcccatgctttcccatcagcaactgctttacttactgaccatgtcttttatttcaagagtgccaagaacactattacctggcgtgcgtagttctcgtctaagagaccgtcagaaagaagagagggagtttttagtaaaacaggcttttatagaagacatgctgcaggaaaacaagcttctatccattcttcttgggaaggaagcaactaaaaaagctgttttatggaatgctgatttactgcctgattccagcaaagattttcagttgcctgatttaacttctactactggatcctctatggcacatatgtcaaatattagttctgcagaaaagagtggtcattatctgcttgatgaaatgagtttgtatatggagaatttgactaatttagatcttggtggtgatgatcttccatgtcacttccaaactgattcaggagcattggcttgtgtgggttgtggaatccttggttttccatttatgactgtgatacaaccaaccgagaaattgataatggaacttcttcctgataatcatctagttcaagtttcctctccagactctactgcttgcgttcatagttccatctcaagggatctttctgtttccgaactttcatcagtaaaggagttgccagatcaatcattaaacaagtgcaataaatgttggaacacctccagtaagtttttgaggcctcggattttctgcctggagcatgctgttcaaatatttgagatgttgcagagcaaaggtggagccaatgtgcttataatttgccattcagactaccagaaaataaaggcacatgccagggcagttgcggaagagatacatagtgcttttgattataatgaggttccattagatactgcatccccagaaaatttgactttgatagatctggcaattgatggtgaagaacatgatgaatgtgaagactggacatctaaactaggcattaacctacggaattgtgtccatgcaagaaataactctccatctaaacaagttccttggatactagggacgctgttgtatgataaatgccttgcttcaaaatctttagctttaaattggcaatcacggagatctcgatcaaaaaggtcaagttgtttggctcagactaaaccgtgtgacagtattgagagaaagaaggaggatcggttttatggaagaatagatgactcccctgctgaaaagaagctacttcaatattcaagaaggaagttcaagtcaaagcaaaggtgtttccctgtagcaagcatggtcagtgaattccaagagaagtccaaaaatttgtcagctactttgaatggggatcataataattgtttttctaaaactgatcttgaagctaagaatttcaggagtgattatgcattgtcatgtgtctctgcttctaccaaaatgtctccaatacatcctgaaatccagattgctgaaatgcctgctagcacgagattaaacgatgctaaaccgcaaccttccaattccattcctgatcatactttaatgactgaagaagttggagcagagattgagaagcaaaccatacaggaatcagatgtagacagaaataatgatttaacactcggtcattctaagatgcattgcaataccagtgtctcagaaatatgtggcaaggagagccaaggttgtcaggacaagaaatgttctagctcacttacaaatgcaactgatagaaatattgaaatgattagaatttctgaaattacagaagcaattatcatcgatagcaggtgtaatagcttaattttgaatggtgaagggcatcaagaatatcagtctacctgcaaaagcaacaatgaggaagctgctttatcacctgcttcattggtaaatcaatctaccctggcatctgtggttggaagttttggaagtccaaataataattatactgcagaaaaaattagcagtcctattttcctagaaaagacaactgaggaagaaattgattctttaagcgaaagggacaaggaacctctaattgatgacagaccaattagcgaacatactctaaaagaagtttgtgaagttcaaagagagctttatgcttctgcagacttgcataataccatagtcttggattatgagatgcaacatgaaactcagggtggaaaagatagcagaaaagaaataaatcagtcaactcttgtttcaacaattacaagaggggaatatgctgaagggttgaatgatgaagtgattccaaagtctgtggagcagtgccagattgaaaatatgaataaaattaatgtggaacctgtttctagctatgttgcaaaagataaagaaaaagaaacggaaatccagtcagtgagtataattgatgaggaattttgctctggcacagatacatcgatagatgactcttcatcaatccaggaatgttctaaaattgagaaagagagctgtgttacagaaaacataaatggaatcaaagccaatttgtcaaaagataatagggagctggaaagctgcgagttgactacagcagttcccagatcaaatgccaggaagaataaaaagagaaaagtgaaaaatacaacgaagaatcaatccaatattgacaactttattagaagtccgtgtgaggggttgaggccaagagctgggaagattgccactgacaaaagtggggtggaaatcaaccaagttgacaaggaaaatcaggtggctaaaagggcaaggagatcttctgaaggtttggttcctcacaaaaataaaaaggatgatgttaaaaagccccataagtgtgaccttgatggttgccaaatgagtttcaagactaaggctgagttactactgcataaacgaaacctttgcccacatgaagggtgtggtaagaagttcagctcccacaaatatgctttacttcaccagcgtgttcatgatgatgagaggccccttaagtgcccatggaaaggttgttccatgtcattcaagtgggcttgggcaaggacagagcatattcgcgtacatactggggagaagccttatcactgcaaggtcgagggatgtggcctttctttcaggtttgtatcagattttagcaggcacagacggaaaacggggcaccatgtgaaacctcctgcttgagaagatataatattcatttgttaactttttgttctcgcaacatgtgcatatttgcagttagattggtaaaagtgaggcatagagtcatgtctgaccataagcattctggttagttgtaaagttaggatagaatggttgttttgtaggtgcacaatatccaattcattcgaaggcagttagagttggtaacttcagagagttttgatctttctctcttactagaattcagatctagcaacatcctctaaaggagggaaaactctccctaggaagctgcatcatgttggttggtcatgcctatgatagcttttgttgattgcctgtacttatggttcttttgaagcagttgataggaccttgatctttcaggatatataattgttcattagggctgtatattactttggattaacattatttattattaagggggacaagaaagttgagagtaaaaacaaggtatgtgctctcaatgattgtatgtactctaccctcttcgctagtaaattcagtggttaaacattcggttgacactgcatattctaatttggttgtctaccctttta

SEQ ID NO: 411 - DNA, 1934 bp, Glycine max
taaaggtcgcatttaaagcccgaaaaagagaaaaaaaagtgacaacgttgcttgaatttgaaattttcgtttttttacgtcacgtgagtgtcaccgataaatcggaacaaaacaaacaaccttagcctgatgcctgagttctccgagcccgatcatgcatttcatcgtccatgtccatggatatgaagatgaacatgcttttctttctcgtcctttttgcttctgcaatttcctcttctcttgccaagggttccttgcaacaaacccttcttccttcagaagaattcaatgacggtagtaatgcaagcagtgcaaggcatttattagaggatgagtctcaggctcagacaagtgttgatttggcacaaggatttatgtccaatgatgaacttgaatgggccatccaagaatttggacaaagatgcagcaacatttccagggtatacagggattcttggaatgggctatcagtattggaaagagtgtaaatggttttccattgtgggtgatagagatttctgacaagcctggagaagaagagactgaacctgcatttaagtatattggaaatgtgcacggtgatgaacctgtgggacgtgagctgcttatatttttggccaattggttatgtgataaccatttgaaggatcctttggcaacattgattgtggagaatgttcaccttcatttacttccatcaatgaatcctgatggttttagtttaagaaagcgtggtaatgctaataatattgatctgaatcgggattttcctgaccagtttgtttttataaatgatgatgaggattcccggcaacctgaaacaagagcgataatgaattggttgagagatatacgattcacagcatctgccactttgcatgggggggcacttgttgcaaattatccatgggatggcagcgatgacaaaaggacaaagtactatggttgtcctgatgatgatgcatttcgattcatgtcaagtatctacagtcactctcattacaatatgtcttcaagcaaggaatttctcggtggaatcacaaatggagcagcatggtaccctctatatgggggaatgcaagattggaactatatacatgctggctgttttgagttgaccctggaaattagtgataataaatggcctaatgctgctgagcttccttttctttggagatacaacaaaatgagcatgcttaatcttgtggcaagcctggtgaagacaggagtgcatggaagaatatattcttcaggcgatggaaggccattaccaggctctataactgtcagtggaataaattacacagttagagctggaaatacttttggtgactatcatcgcatactcgccccaagagataaatatgaagtagtggcaaccatgcctggctacaaatcaaagaatacaactatttggttggacgaaggaccagtgacattggattttgttcttgaccctgaagtcagtgtcaaagggagtgtactacgaaatatctatgattgtgactgtaatggtgaaagcaaacaagaatttgttcagtttctttggggaactcacttggaagttttctttgttgtgattgttgttttaggatttttacttttattatttcagagaagacaaaaagtcaaattttcaacaagcagacagtcagcgggggcaaaaagaactgttgaggtctaaggttattgatatgtaacccactaaggttggcctaggggtaaggagttaggatagatgcatgaggatttaggtttgattttcattgttgtcattgcacaccaaaaaaggttattgatatgttgtttgtattaaattctgttgtatattaaagtgggttgaaaaatgaaacctttttccatgtaaagatttcttcagatggctaacgtgaattcgtattattgaatgctgttgtttaaagaaattaaaacta

SEQ ID NO: 412 - DNA, 2587 bp, Glycine max
aatccactctttgtatgcgggatttaaaattatttatatgcatgtgcattgaacaaagtttttcacaaaagggaatcatcttaattcttaactacaagagagagagagagagagagagagagagagagagagagaggaagtgagtgagcatcatggattcagagacgagtagaggtgcttctttgacggtgaagtatttgcaaatggggatatggtggttctcagtgatgatctttgttgggtatttaatggtttggattgtgatgcccaccaacatcttctttccacattggtttccagatattcaagctaaggcagattcaatatacttcggcagacaagggacaaccatactcatttacacgtttccaattttattaatagccactttagctagtctatatttccacttggagcaaaaacgttctaatcacaataccgaaagcaaggtgggattcttaggatttgcatcatggaaaagaccattgcttggaactggtcctcttgggataatcactatgacagagctctctttcattatcatgtttgttttactattaatttggtccttgtgcttctacatacatggcatgtttgcaagcgtggcactagatgcagctaaggaaagatttcatgagtgggaagtcaagctggaatattcagccctcgctttaggcattgttgggtatatttgcttagccttattgttctttccggtcacgagagggtcttcaattttgcggttcattggcttaacttcagagggaagcatcaagtatcatatctggctaggacacattgcaatgaccctcttcacagcccatggtctaggttatattattttttggggaaagacacatcaaatcttggagatattcaaatggaacaaaattggcgtctcaaatgtggctggagctgtttctctgctagctggattaatcctgtgggctgctaccttaccttccataaggcgaaaagcttttgagcttttcttctacactcattacctctacattgtctttgtaatcttctttgtgtttcatgtgggattttccaactcttgcatagtacttccaggattttacctattcatgatcgaccggtacctgagattcctacaatctcagcagaaagttcgcttagtttcggcacgtgttttgccttgtgaaactgttgaactgaacttcgccaagaacataggactgtgctatgctcctacaagtaccattttcataaatgttcctagtatttccaagttgcagtggcacccttttacaatcagctcttgcagtgatactgattctgatactttaagcattgtcatcaaaagttcaggaacatggtccaatactttgtaccagaaactatcatcttcaattccaatatcccaccttgatgtttcagttgaagggccctatggaccagcttcaaccttttactcaaggcatgagctgctagtgctggtgagcggaggaagtggcattactcctttcatttccataatccgttcactaatttttaaggccaacactgaaggcagcaaaactcctagagttcttctagtatgtgccttcaaaaagtctattgatctcaccacgatagacctcatcctcccagtttcagccacttgcaccgccttcgatatctcacgcttgcagcttcagattgaagcctatgtaaccagagagaaacagccagatatgaatgacaaaaagctaattcaaacattatggttcaagccaaatgcattggatgaaccagtttctgcagttttaggacaaaacagttggctctatcttagcattatcatctcatcctcctttatgttattccttctacttattgccatcctaactagatattacatatatccaattgaccataatactgacatgatatacccttatttctcaaggtccagtctaagcatgttattcatatgcatatctatagcctttgtagcaacatctgctttcctatggaacaagaaacagaacaaggatttggggcagattaaaaacatttacacatccaattcatcaacttctccgggttcaggatactacaatgctgacagagaattagggagtcttcccctccaatccctcgtccaaacagctaaagtacattatggagaaagacctaacataaaaaaaattctctctggctgtaatggatcaagcattggagttcttgttagtggcccaagaaaaatgagacatgaagtagcatcattatgtacttcttgttcaacagatgacctacattttgagtcccttagcttcagctggtgagctataaatgctgttgtgttagttttgttacaagtggcctcttaatccaggggagacagtcaggatctttagtttcattcaatcttgtaatacagttaacaaaagtggctattctgtttgtaaatcttgtgtaaaatggatcactttgctatgcatactgtgattagttaggtgaatttgtaatttgatggcgtaggaatagtatgaactcaattatcaattatcttattccctctggtcatatttttcataaaaaagatgataaagtttaccttattcccctaaacatactg

SEQ ID NO: 413 - DNA, 1890 bp, Glycine max
tctctctctctctctctctctctctcaattcttcaggcaccttcaaaatttctctctagagtcacgatgcttgcgacgctcaaatccgaagagtccagtggtcagttacagctcgtcgaacgagaagacatagacgacgatgaagatctcttcgaagccatcgacaaactgattgctcaaggcatcaatgccggagatgtgaagaagcttcaggacgcagggatatatacttgcaatggcttgatgatgcacacgaagaagaatttgactggaatcaaaggtctatccgaggctaaggttgataagatctgcgaggctgctgagaagcttgtgaatttcggttatattaccggaagtgatgctctgctcaaaagaaagtcagtgatccgaattactactggaagtcaagcgcttgatgaattgctaggaggcggggtcgagacatcggcaattacagaggcgtttggagaattccgatctgggaaaacacagctagctcacactctctgtgtttccactcagctgccaactaatatgcgtggaggcaacggaaaagttgcttacattgacacagaaggaactttccgaccagaccgaattgttcccatagctgagagatttggcatggatcctggggctgtactggacaatattatatatgctcgtgcctacacttatgagcatcagtacaacctcctccttggtttggctgcaaaaatgtccgaagaaccattcagacttctgattgtggattcggtgattgctctgtttcgagtggacttctcaggaagaggagagcttgcagatcgccagcaaaaattggcacagatgctttctcgattaataaagatagctgaggaatttaatgttgccgtctatatgacaaatcaggtcatatctgatccaggaggtggcgtgtttgtaactgatccaaagaaaccagcaggagggcatgtgctagcccatgcagccacggtaaggttgatgttcagaaaagggaaaggggaacagcgcatttgcaaagtgtttgacgcccccaacctgccagaggctgaagcagtgttccagataacagcagggggaattgcagacgctaaggactaaagagtcgcttctgagttgtgacttctgggccgaatccacaaaagaaacagtagtggctgaatatttctggtaaccttaatcttccagatatttgctacagtttgtatgaaaagtgttgttccttgaacacttttactattttccagtgatatgatatgagttccccttagttatacttatacacgtttcctttattgtaagttgcgatacattttgcaatttgaacgtttcacaaacattgaaaatcttgctgcaagtttctactttctagagagagtctatttttgacattatattcatcaccttgatagtttaggtaaggcacagataaggctaaataaaacgagataaaacaaaggcggtaaataatcatttggatgaacctgtccgcaagtttatattattacaagataagtgcgaagagagtatgagcttaaccatttgcttcaaagcaactttgtataacttcatgaaatcatgtcagattcagtaaataaattaatatgataagcaaagcctcaaagttatcataatataggaacaggtccagaacttgcagccgagtgcagctatgataaaataaaagcccataattcaaacagaatagagtcgcaatcagatattatttgaccagttagcagcactcccaacccttggcatgccagttgcttccttcttagcctcagcatccaccttgaaagttgcaccacacacctgtccggaactgtcaacccttggtacaggcttcacctcattcagtggatgctcaaaactgctcaaacctcc

SEQ ID NO: 414 - DNA, 1760 bp, Glycine max
gagaaaacaaaaaagacaaatataataaaaagaagaaaatatggctggagtggggtcagtggtgatgacaccattaataggaaacttgtcggaccgatatggcagaaaagcgttgctcacacttcctctcactgtctctgtcattcctcaagtgatattggcatatagcagggatacccaattcttctacgcgtactatgtggtgaaaactctggctgccatggcaggcgaagggtccttccactgcctggctcttgcatacgtggcagacaaggttccagatgggaaacgaacatcagcattcggaatacttgctggtgttggatcagcatcgttcgttggtggaacattagctgctcgtttcctatccactgctttaacatttcaggttgcttcagtcttgtcaatggttgcattggtgtacatgagaattttccttaaggatagtgtacctggtggtgccatcagacagccattattgaaagtggtcgaggaatcatgtgctgaggatgattcaacaccaaagtcagcaggaacatttaagaaactgccctcactgggggattttatttgtttgctcaagtgtagccccacattctcccaagcagctattgtttcgttcttcaatagtcttgcagatggtggcttgatggctgtattgctgtattatttgaaggcacgttttcaattcaacaagaaccagtttgctgatttgttgatgattactgggattggagccactcttgcacaactatttttcatgcccattttagtgcctgtaataggagaggagaagctgctctccacagggctcttaattagctgcataaatgtcttcgtctacagcatagcatggacagcatgggtaccttatgctctagcaggttgctctgtgtttgcagtttttgtgcgcccaagtttatgcagcattgcatcaaaacaagttggacctactgaacagggaatggttcaaggatgtctttcagcaattagttccttcgccaacatcattgctccattaattttcagtccactgacagccttgttcctgtcagaagaagcaccgttttattttcctggcttcagtctaatgtgccttgggctagcactgatggtagcattttttcagagtctaatgattcgtgctgttcctcctattgcgggtggcaaaattagcggtaaccgctgcacggataccttggtctgaggaggagactagagtgtttcagtcaataaacataaactctttaagtttcattttgcctcggcaaaaatgtggttcatagcatatcagacgataacttagaaagatagcaaaaggaattgcactgtaagtgtagattctagggtcgacatatatgctttggcacttggagataaagaacaccaaatagcaaaatacagaaaatagaacatgaagttggttctgaaaaataataatcaggtgaatcaactgcagaagcacagatttctttacagttatgaagaggaaatgtggcacatattaatgaatcatagggtctcatcagttacatattaaccattcaaacattgcaatttgcaacattaaccattgtgtgtaagcacacctttaggccttagccagttagccatatgctgcctacatttctagctagtatatttttcccaagtttctttgcgtagtcattggtcaaggactttgtaattttcatattttatgtaatggatggttgagttttgaagtatatgaatttgaaccctgtaatgcaatatcgact

SEQ ID NO: 415 - DNA, 681 bp, Glycine max
atggccacaccagcatccatcaccaatgtcactgtggagttccttcaattccccgcggtggtgacacctcctgcctctaccaaatcctatttccttggtggcgcaggggtgagagggttgaatattgaagaagaatttgtaaagttcacgggaataggtgtttatttggaagacaaggccgtgtcatcactcggtgccaaatggaagggcaaaagtgcagctgaattgctggactcacttgacttctacagagatatcatcaaaggtccgtttgagaagttaattcgagggtcaaagttaagaacattggatggtcgtgaatacgtaaggaaggtgtcagagaactgtgtggcccatatggaatccgttgggacttacagtgaagcagaagaaaaagctattgaggaatttagaaatgctttcaaggatcaaaatttcccaccaggctccactgttttctacaaacaatcacccactggaacattggggcttagtttctcgaaagatgagacaataccagaacatgagcatgcagtgatagacaacaaaccactctcggaggccgttctggagactatgatcggagagattcctgtttcccctgctttaaaagagagtttggctacaaggtttcaccagtttttcaaagagttagaggccaatcccaacaatgaaaactga

SEQ ID NO: 416 - DNA, 552 bp, Glycine max
atggcattcatagagaaagctgtggttttcttgatgatgacagctttccaagtttcaaattcagctgttcacaaggttggggactctgctggttggaccatcattggtaacatagattacaagaagtgggctgctactaagaacttccaagttggtgacactatcatttttgaatacaatgcaaagttccacaacgtgatgcgagtgacgcatggtatgtacaagtcatgcaatgcatcatccccgttgacgaggatgagcacaggcaatgacaccataaagataacaaactatggtcaccacttgttcttgtgtggcgtccctggtcactgccaagcaggacagaaggtagatattaacgtggtgaagaaggtatctgcagaagcaccaacaccatcaccaatatcagcaatggcctctccagttccacctgcaccttctcctaacaatggagccccattcattgttgtaaagggagctttaataatgccactgcttgcacttgctctttctagctatgcatcattgggaatatctctacttgttaattag

SEQ ID NO: 417 - DNA, 924 bp, Glycine max
atttggtgaatggtgttgacacttggttatacgcttctcacttaattacgttacgtgtgcatgtgtgaagcctccacgacgcggagggagggaggacgctataaaagtgaagttatccggttgttgagtgcatttaactctcatcattctcattttcattatcttaccactttcaattccaaattcactctcagaaattagaatggctagccaatcaaacactaaatcagttcacgatttcacagttaaagatgccaggggaaatgatgttaatctcgccgattacaaaggaaaggtccttctccttgtcaatgttgcctcacaatgcggcttgactaattcaaactacacagagcttaatcaattgtatgagaaatacaaagggaaaggacttgaaattctggcattcccgtgcaatcagtttggggctcaggagccaggaactaatgaagagattgtggagtttgcttgtactcgcttcaaagctgagtttcccattttcgacaaggtggatgtgaatggtgacaatgctgctccactgtacaagtttctgaaatcaagcaaaggtggactctttggggatagtatcaaatggaacttctccaaattccttgttgataaggatggaaatgtcgttgaccgttatgcacccacaacttctcctcttagcattgagaaagacataaagaagctgctagatgcatgaatgactggagtggccactaaatgaaaaataatgattagaataacatcatgaataatgtactgcagatcagatattagtggaatttcctccgaatttgtactgaaacagttgctctgctcatgtacctctgaattactatttgcttcttcatctatatataaattgtgttgtgtatcaatttatatatgtaaacgaaattcattgctcgtttcattctt

SEQ ID NO: 418 - DNA, 3931 bp, Glycine max
ttttttggaagttggtaagttcaaatagatttatacaaaagaaatagtagagtgctacgagcctagtcagcagcagcttatgtgcactttgggttggatacgaatgagatgtgatgcgaggtgacatacataagataagatgaagatgggcgcaatgcgcatggtagcattagcagttaccagagaagagaaacgaaagttacgaaactataaatagaaaagggacgagtcagagtcagaagctgaagcacgggtagcctttgtcttttacaccttgcattggagacagtgtctgtctgtgttgttgttggcattcacctctcagaacttagtaatataatgccattgtgtttgtttgtggtcacccattctattctatttctaacctgaccagtgactgtgagcaccaaccacttcttttccctcctcctctcccactcaaacacaaacacgcctttttatttttttttgttgcttcctcctcgtcacttccaccataaacgagtggctttgcattgatccatcccattgctcactgaacagaaaaaagaacaaatcttgttgaacttgttactcgtttagatcccttgcaaatctgctctccaaggtatctacagttatcgagttgttcccactagccaaaatctcatttggaaatagaaacctgactgccacattcaattatgaacaacttcaagttaggggtagatgtggttagtgctcacaatctattacccaaagatgggcaaggttcatccaatgcctttgtggaactttactttgatggacaaaagtaccgtacgaccatcaaagaaagggatcttaacccagtttggaatgagagcttctacttcaatatatctgacccttctaatcttcactatatggcacttgatgtctatatccactgccacaccaaagctactaactccacttcttttcttggcaaggttagccttaccgggacttcttttgtcccttactctgatgcagttgtcttgcactatccattggagaagcgtggtattttctctcgtgtaagaggagagattggccttaaagtttacatcactaatgatccaaccataaaatcatccattccaactcctgttgttgagtccatgccaacaaattattcaagctcaacacattcagaagttcgagcacctgcaagcacaatgacaaacagtttgccgaatgaaaaggttgagtcaagacacacatttcatcatctccctaacacaaaccatcaccagcaccaacagcactcctctggctttgcagatactcattatgtaacaaagtatgaagctgatgcaatgaaatctgaaccacagcctatgaaactagtacgcactgctacatcagtacaaccagttgattttgcacttaaagaaacaagtccatatcttggtgggggaagagttgttggtggtcgtattgttcataaagacaagactgctagtacatatgatcttgtggaaaggatgtactttctgtatgtcagagttgtcaaggctcgtgagcttcctgctatggatgttactggtagccttgatccatttgttgaggtgagaattggaaattacaaaggtattaccagacacttcgataagaatcagagtcctgaatggaatcaggtgtttgcattttcaaaggaccggatgcaagcatctgtacttgatgttgtgatcaaggacaaggatctcatcaaagatgattttgtaggcattgtgaggtttgacatcaatgaggttcctttgagagtaccaccagatagccctttggctccagagtggtaccgccttgaggacaagaaaggagagaagaataaaggtgagttgatgcttgctgtctggattggtactcaagcagatgaggctttttctgatgcatggcattcagatgccgccactcctgttgacagcacacatgcgatctctgcagtgatgcgttcaaaggtctatcatgcaccaaggttatggtacgtgcgtgtcaatgttgtggaggcgcaagacttggttcctacagagaaaaaccgtttccctgatgtgtatgccaaggtgcagataggaaaccaagtgctgaaaacaaagacagttccagcacgaacactaagcgcactctggaatgaagatcttttgtttgttgctgctgaaccttttgaagaccatttaattatttcagttgaagatcgggttagtccaggaaaagatgagatcattgggaggatcatcataccactgaactccgtggaaaggcgtgcagatgatagaatcattcattctagatggttcaacctggaaaagccagttgctatagatgttgatcagttgaagaaagaaaagttctcaagcagaattcagctccggttatgtttagatggaggatatcatgttcttgatgagtcaactcattacagtagcgacctccgcccgacagcaaagcagctgtggaagccaccaattggggttttagaacttggagtgctgaatgctgtaggactccatccaatgaaaacaagggatggtaggggcacatctgacacatactgtgtagcaaaatatggtcacaaatgggtcagaacaaggaccattgctgataatctgtgtccaaaatacaatgagcaatacacttgggaggtttttgatcatgccacggttcttacagttggtgtatttgacaacagccagctcggggaaaaagctaatggttcttcaaaggacttgaaaattgggaaggtcagaattcgcatctctacactggaaacaggcaggatttacactcactcatatccattgttggttcttcacccaaccggggttaagaagatgggtgaacttcacttggcaatacggttttcatgcacttcttttgcaaacatgctttacctatactcacgaccactgctgcccaaaatgcactacgtaaggccattctctgtgacgcagctagacatgctgcgtcaccaagcaatgaacatagtggctgctagacttggccgggcagagccaccacttcgcaaagaagtggtggaatacatgtcagatgtggactcccacctttggagcatgcggagaagcaaggcgaatttcttcagactgatgactgtcttctctggtgtgtttgcagttggaaaatggtttggtgatatctgcatgtggaggaatcctatcacaacagtgctggttcatgtgctctttctcatgcttgtttgcttcccagaattgatccttcccactatttttctgtacatgttcttgataggggtatggaacttcaggtatagaccaaggtaccctcctcacatgaacacaagaatctcacaagctgaggcagtgcacccggatgagttagatgaagagtttgacacattccctacgagtcgtagcccggacctagtgagaatgaggtacgatcgcttgaggagtgtggctggaaggattcaaacagtggttggtgatttggccagccagggagagaggattcaggcactgttaagctggagagacccgcgtgctacatccatatttattacattgagtctcctatctgcgttggtgctctatgttactccttttcaggctgtggctggtttggcagggttttacatcatgaggcatcccagatttcgccacaggctgccatgtaccccagtcaacttcttccggcgcctcccttcaagaacagataccatgttataggtaagtgatttttcaaaccagtttttttttctcctttttattgttttatctggtattcgctgtgttttaattttgtaacgctatagtttgtgatactccctagcaagctcaagatttgtatgtggattataattctttttcttctatttctaatgttttgggctttgacttgcacctagtacatgtaaaaatgagtcaagaacttaaccggtatagattttgggaaa

SEQ ID NO: 419 - DNA, 888 bp, Glycine max
atgaatctccctatcatagatctgtcctcacctgatcctctttccactgccatttccatccgtcaggcgtgcattgagtatggtttcttttaccttgtgaaccatggcgtggagaatgacttggtcaaagcctttgatgagagtaagaggttcttctcacttccaccaggagagaaaatgaagttggcccgcaaggaatttagaggttatactcctcaggatcctactttaggcctccatggtgattcaaaagagagctattatattggtcctatggcggattcagcaagtgttaagctgaatcaatggccttcggaagaattacttgaaaattggagaccatcaatagaagccatctactggaaactctttgaagctggaaaaaagttgtattctctaattgcactttccttgaatatggatgaagatttctttgataagataggtgccgtggacaaaccatcagcttttcttcgccttttgcgctatccaggtgaaatgggacctcaccaagagatatgctctgctcattcagatactggcgcgctcaccctcctaatgactgatggagtcccaggactacagatctgtcgggacaagttaaaggaaccacgggtctgggaggatgtgccttacatggagggggcctttattgtgaacatcggagacttgatggagaggtggactaattgtttataccggtcaacaatgcaccgggttaaacgaactggaaaagaacgctattcgatggcattcttcttagaccctcatccagactgtgtggtggaatgcctcaaaagttgttgtagcgaatcatgtcctccaagattcactccaatccgaagtggagactacatggatgaaattttaagcaacacaccagtctga

SEQ ID NO: 420 - DNA, 1762 bp, Glycine max
gcatcatactttaacatggaaggcaaccttatcaacatcctttacctcttaatttttctcatcagtttaaaactactattcttcagaaaaaggttaaaaaacccagcaccaagtccaccatctcttccaataatcggaaacctccatcagctgaagaaacagccacttcaccgagccttgtacgacctctcacagaaatatggccctaataatatcctctctctgcggttcgggtcccaacccgtcctcgtcgtttcgtccgcatccgcagcggaagaatgtttcaccaaaaacgacatcatcttcgcgaaccgttttcgctcttcattgacaaagtacatcggcttcaaccacaccattattacagcatcatcgtacggcgaccactggcgcaacttacgtcgtataagctcgctcgagattctctccaaccaccgtctcaactcctttttaggggtccgaaaggacgagaccatgaagttgcttcgaaagctggctaagggttctgataaagacttcaggagagtggagctgaggccaatgttttcggagttaacgttcaacattatcataaaaatggtgtgtggcaaacgctactacggcgaggaatacgatgggaccaacgccgaggaggctaagaggtttagagagatcatgaatgagatatcgcagtttgggttggggtccaaccttgcagattttgtgccgcttttcagattgtttagtagtcgcaaaaagttacgaaaggttggagagaagctagacgcgttcttccaaggactcattgatgagcatcggaataagaaggaaagttcaaataccatgatcggccatctgctttcctcacaagagtcacagccagagtattatactgaccaaactatcaagggccttataatggcgttatatgtggctggcacagagacttccgctgtagcattagagtgggcaatgtccaatttactgaacagtccagaagtgttggagaaagcaagggttgaattggacactcaagttggacaagaccgtttgatagaggaagcagatgttactaaattacagtaccttcagaacattatctccgagactctgcgattgcatccaccactgtcaatgttgttgccgcatttatcatctgaagactgcaccgtgggaagttatgacgtgccacgtaacacaatgttaatggtgaatgcatgggccattcatagggacccaaaaatatgggctgatccaacgagctttaagcccgagaggtttgagaatggaccagtagatgctcacaagctaatctcttttggattggggaggagagcgtgtcctggtgcaggcatggcccaaagaactctgggcttgactttaggttcgttgattcaatgttttgagtggaaaaggattggtgaggaaaaagtagatatgaccgaaggggggggaactatagtgcccaaggccattccattggatgcccaatgtaaagcacgtccgatcattagcaagattttctaaatttcttgcaagtttgaactttggtcgacgttcaaattatcacattaaattagtagccttacagcgatttttatttgttataattcttaaatttacaatgtgattctttagtgagtatatgctttaataaaagatattcgtgtagatttctctatagacaacaaattatctaaacaaaattaattagtagagaatatacattatcattttatttgtaaaatgcttgtagcttgaaaatataatgtgattatttgaa

SEQ ID NO: 421 - DNA, 1488 bp, Glycine max
atggagaagaagaagggtgagctaaagtcaattttccttcctttcctttccactagtcacataatcccgctagtggacatggccagactcttcgccttgcacgacgtcgacgtcaccatcatcaccaccgcacataacgccaccgttttccaaaagtccatcgatttagatgcgagtcgcggtcgccccatcagaacgcacgttgtcaacttccccgccgcacaagtgggtctccccgttgggatcgaagccttcaacgtcgatacgcctcgggaaatgacccccagaatctacatgggcctatcccttctccaacaagtcttcgaaaaactcttccatgacttgcaaccggatttcatcgtcaccgacatgttccacccttggagtgtcgatgctgctgctaaactcggcattccgaggatcatgttccacggcgcaagttatctcgctcgctccgctgcgcactccgttgaacagtacgcaccccacttggaagcaaaattcgacaccgacaagttcgtgttacctgggttacccgataacttggagatgacgcgcttgcagttgccggattggcttaggtctccgaatcagtacactgaactgatgaggacgattaagcagtcagagaaaaagagttacggttcactttttaatagtttttatgacctcgagagtgcttactacgagcattacaagagcatcatgggaactaagagttggggaattggaccggtttcgttgtgggcgaaccaggatgctcaagataaagctgcacgagggtatgctaaagaagaagaagagaaagaagggtggcttaagtggctcaactccaaagcagagagctctgttttgtatgtgagttttgggagcatgaacaagttcccttactctcagctcgttgaaatagcacgtgcgcttgaagattcggggcatgattttatctgggtggtgaggaaaaacgatgggggtgaaggagataactttttggaggagtttgagaagagaatgaaggaaagtaacaaaggatatttaatatggggttgggccccacagttgttgatactggagaatcctgcgattggagggttggttactcactgtggttggaacacggtggtggaaagcgtgaacgcggggttgccgatggcgacgtggcctctgtttgcggagcattttttcaacgagaagctggtggtggatgtgttgaagattggggtgccggtgggggcgaaagagtggaggaactggaacgagtttgggagtgaggtggtgaaacgggaggagattggaaacgcgattgcttcgttgatgagtgaggaagaagaagatggaggaatgaggaagagagccaaggagctaagcgttgcggcgaagagtgctataaaggttggtggatcttcgcacaacaacatgaaggaattgattcgggagctcaaggagatcaagctttccaaggaggctcaagagaccgcacccaatccttaa

SEQ ID NO: 422 - DNA, 1543 bp, Glycine max
aaacttcttcatccatacctacacgcttgttactaatcattgagttgattttatttttcaaacaaccatggaaaatccatcttctcccgaagctccggctccaaaatatgagaatctgattacggttctcagcattgatggtggtggtatccgaggaatcattcccggcgttattcttgattaccttgagtctcaacttcaggagttagacggtgaggatgcaaggcttgcagattattttgatgtaattgctgggacaagtacagggggactcgttgcttccatgttagcagctccaaatccaaaggccaacaatcgccctttatttgctgccaatgaaatagtgccattttacctcgaaaactctccacaaatcttcccccagaaaagggggggaatattcgctccgttggtaaacatagggaaagctttgacaggacctaagtacgacgggaagcatttccatgagttgataagaaacaagttagggggcacaaagttgcaccaaaccttgacgaacgttgttattccaacttttgacgtcaagatacttcaacctaccatcttttcctcgtatcagatggcgaaggagccaacgttagatgtactactgtcagatatttgcatagccacttcggccgctccaacatttttgccggctcattattttacaaaacaagatgaacaaggaaaagtgataaaagaattcaaccttattgatggcagtgtggctgctaataatccgactttatgtgcaattagagaagtgacaaagcaactgataaggaagggaaatgggggaattagtatcaaccctttggagtatagtcgttttcttgttctctcaatagggactggatcaaacaagagtgagcacaaatacaacgctaagatggtgtcaaaatggggaattttaacctggttattcaactctggatcaactcccattttggattgttttagcgaagcaagctttgatatggttgactaccacaactgtgtggtttttagtgcgcttcaatctgaagacaactacctccgcattcaagacaatacattaaagggggatttagcatctgtggatgtagctactaaagagaatttggataatctggtcaaagtgggccagcagttactgaagaatacagttacgcgggtgaatctagatacgggtctctatgaaccagttccagataaaggcaccaatgtggaagcactcaaaaggtttgcaaaattactttcggaggcaagaaaggggagaaagtccaactcacaatgacaagaagatgggaagtaaatgatcgccagctgaatgaagaaaataattgttgccgatattcaaacttaaattctattgatagtataaacattatttccattgttgcctaattataaattgtcatgctttaatataagttgtcatatatggtaattagtttattattttttataataactatttaaaagttatcccaattttttttaattagttaatggtgtaaaaaaattacatatttgagaattatactctaaagtaaaagca

SEQ ID NO: 423 - DNA, 2417 bp, Glycine max
ccttctcacccggttagaacccatccataaaaatgacccgtttggatatccgagccgagacggaaagggaaaatcgaattcttccgccgtccgcggtggagagtaaccattttcatatttcagttcagtggcttaaattaaaaactgaaaatatttagcatcacccaaacaccagaagttaccctttggcgccaaaaacgaaaccttaggaagcgaaaatgaaagagattgtgactgtccaagttggtgatttcgccaacttcgttggttctcacttctggaactttcaggatgagttgcttgggttggctgaggatccctttgctgattctttcttcaagaatcaggatcttaacatggatgtgctttatcgtactggtgagacacagcagggtatcccttcatatactcctcgcctactttcaataaacttaagaggatcccttggatctatgagttcacgtggtacattgtatacggaggttgcttccacaacactagatgttgtcacctggacgggtggagtttccacccaagcctctgaaccttataaaagaaatttgttcttacaaagtctttatgaagaagaggaaaacttgaatatgataaatgagatccgtggttcaaataatggttctcaaagtgagtatgaggataaggatataactgaatgcctagaaaatggtgtacagttttggacagactactcaaaagtacattatcacccccggagtctatatgaattaaatggagtttgggcagatgttgaggaatttgacaattatggaattggaagggactcctttgcttgggctgcgcaaggggaagaaattagtgacaggcttcgattttttgttgaagagtgtgaccatatacagggatttcaatttgttgttgatgactctggaggtttctctgctgtggctgctgaatttttagagaatattgtagatgaatatacaaacattcctgtcttactgtatgctgtccaaggttctggttcacgcacaaatcttcagagcaggaagcatacagtcttagaggatcttcatgatgctgtatcattttcaagattatcatccttctgtaaacttattgtgcctgttggtctgccctccttaagtaaaagtaaagcttccagattcctccacattgaagatgcgaagcattaccactcaagtgcagtttatgctgcagcactgcactccattagtctaccttttcgaatggttccagttgggcctacttcagatgcttgttctgtttctggtgctgtagatgttcacggagtcgtacaaatgctatcaggacaaggaaggcagaatatggtgtcagttctggatgttgccatgccagcaccagctttaactggggtacagaatgaattgtctctgttagagattttgcagccgttgaccccacaaatagcagaggatgttgaagacatgcaggctattgaacacatgactgtccatggagctcttgcatcagaaggtcatcgcgcttcagttggtcaggtaaaggataccgttgatgctgcttttctatgtgccgatacaaggccaatgttctgccatctatctgttgctcttagtcccttgccaatccccttgccttttccatcaatctttgggaacaatgttggccagcacggtgaattaatgagtggtcaaattactaattcttcaccaaaaggatcccttgtcatccattccattcccatggctgccagattacgatctagcagtattgtgttaccattcttggagagtaagctgcgaaatcttcaccagtatggaatccaacgacgagcagcgggggcagagttacttaggacttggggctttggccaggaagaattggtggaaatggaagaggtgttgtctaaaatggttgcggcattacattctcctcatttgtcatcagattcagattagaatatatgcgttgttcttcccaaaaaaataaaaatgaagccaggtaaaaatttgtaaggttactacttgtaacaaatttgaaatttgcactgtggtgcgctggctgttcatgtcttttggcattgtatgggtttcatgctttttgttggtaaattcctcgaagccacatagttgattttttctttacaggtataagaagtggtataaaaaatgacatctgtggttttgtttcttctcattcttggtaacttgggtgcttgcccgtggtttgaatattcatcatgtagttattgaagttgattcgtgcggtggctttctacttcttccaatctgggggagcttatttaaaatgaacaatacactagacctagaggctatcttctgcatttcgaggagttatcagccttcacacgatgttttatgtcttttattttagaacttattgtatagtttgagattatgtaattttaaccaatttct

SEQ ID NO: 424 - DNA, 1969 bp, Glycine max
acactattatgatttaattgagactaaaatagtgatccactcatgattaaaataagagtaagaccgttgttcgcattaggatttaaatttctataagaactcaaaggattctcagcaaacaatgaactcctgagaccagtagttgagtctagttgtttcccttaaagccatggaatattctccattgtccattgttattaccttctttgtgttcttgctcttgcattggctagttaaaacttacaagcaaaaatcgagtcacaagttgccccctggcccatggaggttacccatcattggtaacctccatcagctagcattagcagcttcacttcctgatcaagctctccaaaaacttgtccgcaaatatggacctctcatgcacctccaactaggtgaaatttcaacacttgttgtgtcctcccccaagatggctatggagatgatgaaaacccatgatgttcattttgtgcagaggccccaacttctggctccacaatttatggtctatggggcaacagatattgcttttgctccatacggtgattattggaggcaaatcaggaaaatatgtaccttggagcttctaagtgccaagagggtccaatctttctctcatatcagacaagatgagaacaaaaaactcatacaatcaattcactcatccgcaggctcaccaatcgatcttagtgggaaacttttctctttgttgggaaccactgtttcaagggcagcgtttggaaaagaaaatgatgaccaagatgagtttatgtctttggtcagaaaagctataacaatgacaggaggatttgaagtggatgacatgtttccttcattgaaaccgttgcatttactgacccgacagaaggccaaagtggagcatgttcaccagcgggcagacaaaatcttagaagacattctcagaaagcatatggaaaaacgaacaagagtaaaagaaggcaacggtagtgaagcggagcaagaagatcttgttgatgttcttttgagactcaaagaaagtggcagcctcgaggttccaatgacgatggagaacatcaaagctgtgatatggaacatatttgctgctggaactgatacctcagcatcaacattggagtgggcaatgtcagaaatgatgaaaaatccaaaagtgaaggagaaggcacaagctgaattaagacaaatattcaaaggaaaggaaataatacgtgaaactgatctagaagaacttagttacctgaagtcagtgatcaaagaaacgttgaggttacaccctccttctcagttgattcctagagagtgcatcaaatcaaccaacattgatgggtacgaaataccaataaaaactaaagtcatgataaacacatgggcaattggaagagatccccagtattggagtgatgcagataggtttatcccagagagattcaatgacagttctatcgatttcaaaggaaatagctttgagtatataccttttggggcaggaaggagaatgtgtccaggcatgacatttggattggctagcattacgcttccattagctttattactctatcattttaattgggaactcccaaataagatgaaacctgaggatttggatatggatgaacacttcggaatgacagttgcaagaaaaaacaagttgtttttgattcccactgtttatgaagcttcatgatacacgtattttttttataggccaaaagagatttaataagaataccagtggtactcaaaataaaaaaaagttatggagaataaagaaacttaaaacacacacaaatataatatttgtagtgtctgttgacacctccacactttggggagtctagtttgatgtaattttttgtttgttattgaatctataatctataatatttgattatcattaatgatggatattttttgcaagtgtcaagtttttactattcattgtataatacatttatacactgttttcttc

SEQ ID NO: 425 - DNA, 2529 bp, Glycine max
actcatataaataactcagggcggtggctatgtcaaactgagaactaagatcccgctggcggttggcgcaacctttcgatcttcatccaacggggcaacgttggatctgctgaactgaacttctttttatatgcactctgtgatttcactctgcttcgccatcctatgggggacaacaacagcaacaacgatgccttcatgcgcaaccaaaacgccgccgttcaggcccgcaccaaagcgcagaaccgctccaacgtccttcagctcaaactgattggacagagtcacccaaccggtctcacagcgaacctgttgaagctcttcgagcctaggcctccgttggagtacaagccacctccggagaaacgaaaatgcccaccgttatcagggatggcacaatttgtgagcaagtttgccgagcctggcgagccagaatacgctccacctgtcccagaaactgagactcctgcacaaaaaagagccagaatacacaagctaaggcttgagaagggagctgcaaaggctgctgaggagcttgagaaatatgatccacataatgacccaaatgtgtcgggagatccatacaagacattgtttgtggctaaactcagttacgagaccactgagagcagaatcaaaagggagtttgagtcatatggtccaatcaaacgggttcgattagttgctgacaaagatataaataagcccaggggttatgctttcattgagtatctgcatacaagagacatgaaagctgcttataaacaagctgatggtaggaaaattgatggtagaagggtgcttgtggatgttgagcgtgggaggactgttccaaattggagaccccgtcgcttaggtggtggacttggtaccactagagttggaggtgaagaagttaatcagcgacattctgggagggagcaacaacagtctcgttctgaagaaccgagagtgcgagaggaccgacacgctgatagggaaatatcacgtgaaagaggtagggacaaagacagagaacgggagcgatcacgtgaacattctcatgaaagggtcagggatcgtgatcatagggaggataggcaccacagagaccgggataggaacagggacagagaccgagacagggaaagagatagagatcgtgggcgtgatcgagatagaacacgggaccgtgatcgtgagcgagggagggaccgtgatcgggatcgagaatatgatcgacatcgtgagagggatagagattatgaagttggtgaccctgatcgaggacgctcacgtgatagggagtctgattatgatcgtgttgaatctaaacatggggaaaggaatcatgactatgaacctgaggatgatcgtggtaggcataaccagtatgaacatggacgtaggcatgcagaccctgatcatgaccctgagcggtatgaccactacaatcatggagatgaccatggtgaccattacaatcagtatcgtgaccatgatgggatggaagatgactaccatgctggacgtgcaacatctgaatcgcatgaaaaggagagaagtcatgatgtggaccgtgaatatcaacgctcagagagatcacattcccgggagtatgattattaggacttgggcatagttcttctcaactttgttggtaagattttataatttggtatgtttacttttgaatcttgctcacctgccggtattggtagttgttgaatggattaaggcacagtgtgatcattaaaaagaaaactgtagctgctgctatccatatggcccatatttgaaagctgccttttgtcaacgtggacttggacatctaatattggtatttgtttggcatttgtgttgttttcttctgacattttatgaaattaaacatctaatattggtatttgattttggcatttgtgtgggttccaagttttatttggtctgttgatctgtctgagtttgtgtttacaatacagagcttccagcattatttgtccgttttcttacgttggacaccaattaattatgtgacagaacttcttccagggttatttgaggtttgattttgatcgtctgattcggtttcattcgtaaaacccaatcaaaagcgattattggagctgacagtagtgaaattagctactttgatttcaattgcgttttgaaaacaaatgccatggaaattaatagatctgggttgcttatatgcaagcaatcggttcttgtataagaactcaactctatttgttccaatggttaacataagaactttaagagttcataaaaattgagttaatcaaccaactccagcgaagagactgttatattcgtctttttttcattatcgaggaaatagaaaggttagaaaataatttataatttttgaactatacaaataattgtcgtaagatttatacttttctcgtcttttctattaatttttataagtgtaatagtttattattcatatcttttactaccaaaaattttcatttttacaaactaaataagataacactttttatgtgagcattaaactaaata

SEQ ID NO: 426 - DNA, 2279 bp, Glycine max
tttagttttgccaacgccattttttctgttcttttctctctcatttcattcaaaaagtctcttttgaccaccaccttcttcccttcttcgtcgtcgctgcttccttctttccttcttcctatttctctttctctttctctctcattcacactacacatatagctctcaactctctctctctctgctaatgaatgaatggtcagcggctctagcagcaacaacgccgccgcatccaaccgtaaccgcaaaggtctggccgcgccggccccggcgccgccagcgcagccggagctggagccggtgacggggaagcagaagaagcaaccgtcgcaggctaaacggcggcaagtgccggaggattcgcagaagaacccacgctccaaagacaaagcgggtgcgcgtcggcaagggacgcatgttccgtgcggaaagcgaacggatttcgggtacgagaaagacttcgagaatagattctcgctcgggaaattgttgggacatggacaattcggttacacctacgttggaatagacaaaacaaatggggatcgtgtcgccgttaagagactcgagaagagcaagatggttctccccatagcggttgaggatgttaagcgagaagtcaagatattgaaagaacttacaggccatgaaaatgtggttcagttccataatgcttttgatgatgaatcatacgtgtacatagttatggagctatgtgagggtggagaattgctagatcggatattggccaagaaggacagtcgttatactgaaaaagatgcagctgtggttgtaaggcaaatgcttaaggttgcggctgagtgtcatttacatgggttggtacaccgggacatgaaaccagagaattttcttttcaagtcaaccaaagaagattcacctttaaaggctaccgattttggtttgtctgattttataaaacctggaaagaggtttcaagatattgttggcagtgcttactatgttgcaccagaagtgttaaaacgaaagtcaggtcccgagtcagatgtatggagtattggtgtgattacatacatattgctttgtgggagacgcccattttgggataagacggaggatggtatcttcaaggaggtcttacggaacaagccggatttccggcggaaaccatggcctaccataagcaatgctgcaaaagattttgtgaagaaattgttggtaaaagatcctcgtgcaagatatactgctgctcaggctctatcacatccatgggttagagaaggaggagaggcattagagattcctattgatatatctgtcctgaacaacatgcgacagtttgtgaaatatagtcggttgaaacaatttgcactaagggcattggctagcacacttaatgaaggagagttgtctgatctaaaagatcagtttgatgcaattgatgtggacaaaaatggttctattagtcttgaggagatgagacaggctctcgctaaagatcaaccttggaagttgaaagaatcacgtgtgctggagatattgcaagcgatagacagcaacacagatgggctagtggatttcaccgagtttgtggcagctacattacatgtacatcaattggaggaacatgattctgacaagtggcagcagcggtcacaggctgcttttgagaaatttgacttggataaggatggctttattactccagatgaacttagaatgcatacgggtttgagaggctccattgatccattgcttgaggaagccgatatagataaagatggaaaaatcagcttaccagaatttcgtagacttctaagaactgcaagcatgggttctcgacccataatgagcccaagtcaccgccatcgaaagatttaagattagatttgtttcggaggctgagataaaattcaggatatgagagtaatggatttcctttaagatgatcttatatgcagattgtgctgaagacctccttgtgatatatctattctgctgcacattttgcactatgaccaatcaatatatggggctctgaaactagagtcaatattgactatggcatatcgcacaggattgtgttaagcttagtctagaggaccatttcaagaggagtttaaatagtgtatgtagaccctgcgtggatcagagtttcatcggtgtacttcatttaagtgccaaggttttctgttatgggcttgttagtgccatacatgtaatctgtaatactattgtaactataaataaaaatacttcttactcacctcctccccctccaaaataatccttcaattaat

SEQ ID NO: 427 - DNA, 1723 bp, Glycine max
caagtctaagctcgaaagcacgctctgaccaaaaataaaaacgagtgatcgaaaaatcaaaattttagaaaaaaccaaactaaaattctcgtgacccttccttggtagttggtacttggtttggcacgcctgagcctgagatgagatgagtctcacgccaacttgtcaaaagaacccttcttagcccttcttcggtcaccgtcccgtgttagttgaaagtgattttttttttaattattcatatagattaaaattaaacacaaaatatttccttcaagaaaaaaaattagccagagagagagcgagagagagagagaaagggtcgctttaaggcacagaagctttaaatgcgagttggttgattgtagcttcctttcaatcttctcctaatgcttatggactaagcatttgcccaagagcgcgttttttattctcaatatccttcttcttgttattattattattgttattgttctttgttgttaacatatattaataactctttcttaaacccaaatcttgtgacatcacaaaccgtaccctttttgtttatttcctttgtgggttttcaattcgtgcaaatttctgcgacacccagatggattttgcgctgaatccgtgtcctttgcgatcttctacgttcgtgaatttcgtcgagagggttaaacagcttggtaccctcgccttttctgcagtcattgggaacatcttctccgcgatcttgaccttctgcttcgcattagttggcactttgttgggggctttgactggagctttgataggacaagaaactgagagtggcttcattcgaggggctgctgttggtgccatatcaggagctgttttttccattgaagtgtttgaatcctctcttgttctctggcaatctgatgaatctgggattggctgtgtcttatacttgattgatgttattgccagcttactgagtgggagacttgtgcgtgagaggattggtccggccatgttgagtgctgttcaaagtcagatgggtgctgttgaagccagctttgatgaggttcaaaacatcttcgacaccgggggttccaaaggtttgtctggagatttggttgaaaaaatccccaaaataaaaattacaacagacaacaattttgatgcatccggtgatagagtctcttgttcagtttgcctgcaggttagttcttacacttttctttgtcaataccactagatgtctataccttgaactaaatatttctaagattgtgtattgtgatatgaacatttctgcatttgtgcaatatataggactttatgcttggagagacagtaagaagcttacctcattgccatcacatgtttcacctaccttgcatagataagtggctcttcagacatggttcttgcccattatgcagaagggatctgtaattttgtatatgcttagtacagaccgctaataatgtccctattttatttttgtttttgtttataagcttatttaattctaggacttacatctagtgggagccattgcagtttgagtggtatcattgtactaaattagtgtaaagaaaattttgagatgaaacagcttccacttgtatatggaggagagtgattgacccattttctagcccgtctccactctttttctgctcttttttttttttttttgaataaagaacaagagacggtgatataactagtgttttgattcttgccaactagtgtatgtttggtt

SEQ ID NO: 428 - DNA, 684 bp, Glycine max
gccgcctgcgatgtttcataaaatagataaaaaaaagaggagttggggggaggtgtgttctctgggatggggctattgtggtttttgggtttgttattgctgttactgggaccttcacttctgtgatggagattctttggcctacccctacagcatgattcagcacaaaaaaaaaaaaaaaaaaaccttgttaatacatgtttggataaccattttggatgctgaatgtacttttggagaaagatactcttttgtgtgtgtttgtttttcggttcaacacccccctcaaacggaccttcaaggagaagtagtaacaatttgttgcttctcacaaaatggtgcttggaaacgtgtgtccacggaatgaaacgcaaccatgctttacatgtttttggtgtaagcttggtttgtccttgatggagattcttgcttccagatgctgattgagctgggaggaattctttttgttggatttgatgcttacctgaatcaagtgttcagtttgctgaattcgtctagaataaagctctgcctattattcttttttgctgttgtatgctgttctttcttttttgtcaaaaaatgtaacatatggacctattatgataaagtttgagaattattccattggttagctgtttgaaattttctgcttcaatacttttgcttctatggaccaacgag

SEQ ID NO: 429 - DNA, 1293 bp, Glycine max
atacgtatgatcagttagtgttgaagagtttagttcataatagtagttggatcttctgcataatcatattcaatatgattttctcaagaggcaacaccgccatgtctgccatattgctgcttcttggaatattatcttccactggagtagaatttacgggggcacaatctgttggtgtgtgttatggaggaaatggaaacaatctaccaacaaagcaagcagtggtggatctttacaaatcaaacagaataggcaaaatccgtttatactatccagacgaaggagtccttcaagccctcagaggttcaaacatagaggtgatcctcggtgtccctaatgaccaacttcaatctctcaccaacgctggagctgccacaaattgggtcaacaagtacgtgaaagcatactcacaaaacgtgaaattcaagtacattgcagttggtaacgaaattcaccctggtgactctttagcagggtctgtacttccagcacttgaaaacattcagaaagcaatttctgccgccaatttacaaggccaaatgaaggtgtcaacagcaatagacaccactttacttggcaactcttacccaccaaaagatggcgttttcagcagtagtgcaagttcatacataagaccaattgtaaactttttagcaagaaatggagccccacttctcgcaaacgtgtacccttacttcgcctatgttaacaaccaacaaagcattggtcttgactatgccttgtttactaaacatggtaacaacgaggttgggtaccaaaacctgtttgatgcattgttggattctctatacgctgctcttgagaaagtaggggcaccaaatgtgaaggttgttgtgtctgagagtggttggccatctgaaggtggagttggagcaactgttcaaaacgcaggaacctattaccgcaatttgattaatcatgccaaaggtggaacccccaagaggcctagtggacccatagagacttacctctttgccatgtttgatgaaaaccagaaggatggtcctgaaatcgaacgacactttggtctcttcaggcctgacaaatcacctaaataccaactcagtttcaattgaaacagtggatcataaactcggtgctgattactcagaataattaagggtatctcattacatatatatggttttaattagtttaatttgcaccgacctcaatgtactacgtactagtacgcaagtgatgcttctaattattaataaatgcatctctaccactttatatctaaataataaatgttttaattccttgcgt

SEQ ID NO: 430 - DNA, 909 bp, Glycine max
atgattaatatggcaaccatggaagacatgagcaacatgagtggtgaaattacacttccagggttccgattccacccaactgaagaagagcttctggatttctatctcaaaaacatggttgttggcaagaaacttcgttacgatgttattggtttcctcaacatctatcagcatgatccatgggatttgcctggtttggcaaaggttggggaaagagagtggtacttcttcgtgccaagggacaaaaaacatggaagcggtggaaggccaaaccgcaccactgaaaaagggttctggaaagccaccggttcagaccggaaaatagttaccttatctgatccaaagcgcataattgggttaaggaagaccctggttttctatcagggaagagctcctaggggatgcaagaccgattgggtcatgaatgagtaccgtttacctgacaattgcaaactacccaaggaaatcgtgttatgcaagatatatcgaaaggcaacttcgttgaaagtgctggagcaaagggcagcactagaggaagagagagagaagaagcaaatggttgataattcccctgcttctcctccttcctccacggacaccatgtcctttagcagcccacaggaagagcaaaacttgcccttgcccttgttgcagcatgttcttaagaaagagtctgaaacaactgaagacatggtagtgtcaaaacaagaaaaaacaacgaaccaattgaccttaaaagacaccaaaagcacttgtggcacatcacttcaaatgccttttgggaaagagaagctgccagaccttcagcttcctatgctctcggattggacccaagataccttttgggctcagttgaatagtccttggctccaaaactttactcccaccaatattctaaacttctactga

SEQ ID NO: 431 - DNA, 1301 bp, Glycine max
aatttgaaaattgagaagagaaatgaacaagaaagagattgaaaagtggattggaggagatgagagtgcctcggagatgctgagtagagtgagcagcatgcgacctttcttgtttcctccgccgctccacagggttcctctccgcgtcggaaacgtcgtcgagcttgtggggccctctccttccgccaaaacgcacattctcatccacgccgccatcacttccgttctccccaaatgctacggaggcctcgaccacttggtcctctttctcgacctcgattgtcgcttcgacattgcgcgcttctcccaattgctcattcatcgcattacccaacacggaacggattcttatgataaaacgctgtatgctctctgtatggcccgttttttgtacgtccgttgttacgacagctttgaatttcttcacactctcaggacattgcattgtcgcttagagaaggagaaagaagttcacggagttggtgtccacctcctcatgattgacagcatcggagcttttcattggatggatcgtgcatcgatgttcttgtctcaaagagaaaacagcaagaatatggaggaaggatgttcaaaaaatgtggcaagaaaccatcaaaatttccagtatcgtgaatacatgccttctgtctggcagtcctttgttacacacagaatacttgtacgatcttcagatgagcatcctgttacaaccaattatcaaaactcttcattctatttgttggaatggttattgccaagattgagttttccggataagattgtagtgaaagatgctggtgtctttgttgattcatgaagcacttgttgcaaagggatgcctatatataaacctatgggaagcttcatgggctttcacgaggtggtgattgatgggaggatccatactcttagattacaagaacctatttcagatgtggcgtggatcaaaagaaggatctaatattgtcaacctgactcaagaaaacttctagtactcatacttgatagttgaattttgtttgccctccacatccttttccggtcatgattttgcttacattcttcatatctgtaacttgccagtgtctgcactgtaaaattccgatgcttcatagttcatatcatgagtagtttgtatgcgaatatgacattttttgttaaggaaaatatctttctattattatttttgtgcatccctaaataaaattatctttacttttttaagtaatcattgcattgttgctaatcttttacatacctattattctctcttttatttgttatgatttttttggacgtaa

SEQ ID NO: 432 - DNA, 2817 bp, Glycine max
aaaaaagagagatgagaaaccattgattcaagttaacaagcgaggtatgagtaacaataatgttagaaagttgtagcagaaacttgttcataatttaattgggtgagttgggaatgatgcacccttctctgccacatataaataaataaataaagaacctctttgtgttagaataataacataaaaccaggcaacagtgggagatgataataggatatatctttcatgtgaaaaaagcattttctcttttgtcataaagggtgcatatccaaaatcacaactttatttttttatctgttttccttcaatgcagaagtagctatgccgaagccttgtgacttgcaaatcaacattgatggtcagcagatattccttttgaaagagaaggtcatatcaaaatactgtggagggttgaagaaactattgaatcaccaaaagagaagatgtcatgtgaaggagttggggattagaatcaatgatttccctggaggaccagaagggtttgagctagtttcaaggttttgttacagcaatgccaaaatccagatcactgtggctaatgtgtctctccttcactgttgtgctgtttatcttggaatgactgaggaatcattcagcaacaatctcttgcaacaaacagaaacttttcttgagagaatctatcactggaaatggaatgacatacttgcaagtctcaagagttgccagctgttttatgcatatgcagatggctatggtctcttggagaagatcattagtgtcttggcaaagtttgtccagaattcagattcaaacctcctcacttcctcgccttcagcatcgtcgtcctcttcttcaccagaaagcagtttcgcccagagattctctttctcatccaagaaaactaccccagaaaaaatcaagtcaagtttgccgcgcaaggcgtggtggtttgatgatttggcaactttaccaccaaagatcattgagaaactcttccagactattggagcatacaaagctgataacaaggacttaatcctcacaagatttctgttgcattatctgaaaaatatagctactcaaagcaaagtggttaattgcaggaacagcaatgagtatgctgctcttgcagaaacagctgcttatggggtcatatctgttggtaaagagatattttcttgcagaggtcttctttgggtactaaggattgtatctaagtttgggttgagtagagactgcagaactgaattggagaaattgattggtggaatgcttgaccaagctacactggatgatcttctagtctctggacatgacatgggagtttattatgatgttaatttggtgataagattggttagattatttgttgatatcaatggttctgatggactacagaaagtgaaaagggttggtagattaattgacacgtatttgagagagatatcccctgaccacaacctcaagatctctaaatttcttggagtagcagaatgcttgccagacactgcaagggattgctatgatggggtctacaaagccattgacatctatcttgagtctcatccaactatcacatttgaggaaaggtcgagattgtgtagatgtcttaattacagcaaactcagctttgaagctagtaaagatctggccaagaaccccagaatacctccaagggttgcaatgcaggctcttatttctcaacaaccaaaaatttcaacaagtgacttagtaactgagagtccaaggatgaagcactcccaattagttttgtccaatgaagccaacagagaaagcttctcccaagagaggagagatatgaaactaaacatagagaaaatgcaatggggtgtaatagaactggccaaattacgcaagcaaatgaacggtcaggagccacagttgtttacccataatgtcttgcttaatcctgctcgtgcttcatcctcaccaagattttgttgagtatcctcctcttgtgtacctgtctaccactatccatgatattatggtgtatttctggaattgtaaaaagatgtagtaattgttttgtactttatatttgctttagaattttcaacgtgatagatgaaatcaaatagcaaagatttcttcattatgcatggcaacacttgaagttgcatacataaacattattggataatattctgcgaacaagagaacaatgtgaatgtgtattacgtgctatgggtagtaaagtttttgatagcttcagatgtcatcgttttaatccatctgtaactagtgacatggcaaccggcttgagatgcatagtaagctgcttttttccccctttcaaataataggaataagaactaataaacaagagcaaaaagagttgtgataatgcagtgttacactggagaatgtagcatgagggcaattgtgtttctcaaacataggacatgaatgttttgatttcaatattgtcaaacagaacataacaatgaaatcagagtacatgaaatcatagcaatcaattaaattagacagagtaaaacagagatggcgaacttaatttctagctttggagtttacactctaccatgacccactacctttcagtttgttgggaaagataattcccctggctgtccatgcattctaaatttgttaggctttgattgatatgatgaaaatacatataaatgaatggaatctatgtaaatatataatcatttccttccgaaagggcataagaaaatggtggggctcacaaaaattatatcaccacagttctttcctttcatttgcaaatgtgctaccaaataaatagtgaacttcatcctcccaattcaaccttttttctttcct

SEQ ID NO: 433 - DNA, 1351 bp, Glycine max
gaaaacaaataataacgcaactcccacccaaaccgtgagtgcggaatctatcaatctcaaaccgttgaaaacacgatgcgaaatattttcaacctcaaataaataacgttgagtttccaaacttaccacactcaatcacgagccaaccataggcgaagaacggaagaagccaccatagtcgtcgtcgtgagcgaagatccataacaatacagttacaaattgcaacaacacactcctcgttcgatcgtagccagaagaatgggaagtttgggagcgattctgaagaatccagatgacttttaccctctgctgaagctgaaaatggcggcgagaaacgccgagaagcagatcccgccggagccacattgggcgttctgctacacaatgctccacaaggtttctcgaagtttcgccctcgtcattcagcaactcggcaccgagcttcgcaacgccgtttgcatattttatttggttctgcgagctctcgacaccgttgaggatgatactagcatagaaacagatgtcaaggtgccaatactgatagcctttcaccgtcatatttatgatcgtgattggcacttttcatgtggcacaaaggagtacaaagttctaatggaccagtttcatcatgtttcaactgcttttctggaacttgggaagaactaccaggaagcaattgaggacattaccaaaagaatgggtgctggaatggccaaatttatttgcaaggaggtagaaacaattgatgactatgatgaatattgtcactatgtggcgggacttgttgggctgggtttatcaaagcttttccatgcgtctggttcagaagatctggctccagatgacctttccaattcaatgggcttgtttctacagaaaacaaacattattcgagattatctggaagacatcaatgagatccccaagtcacgcatgttttggccacgacagatttggagtaaatatgttaacaaacttgaggatttgaaatatgaggagaactctgttaaggcagtgcaatgcttaaatgacatggtcactaatgctctgatgcatgctgaagattgcttaacatacatggctgctttacgtgacccgcctatatttcgcttttgtgctataccccagataatggcaattggaacacttgcattatgctacaataacattgaggtcttcagaggtgtagttaaaatgaggcgaggtttaactgccaaagtgattgaccgaactacgactatggctgatgtctatggtgctttctttgattttgcttctatgttggagtccaaggtatgaatctttcgttgtcctgaacacattatgattaggttttcaacagaagaatgtg

SEQ ID NO: 434 - DNA, 411 bp, Glycine max
atggctcgtacgaagcaaacagcaagaaagtccaccggaggaaaagctccaaggaagcagctcgccaccaaggcagcacgcaagtccgctccggcgacgggcggcgtgaagaagccccaccgtttcaggccggggacagtggctctgagggagattcggaagtaccagaagagcacggagcttctcataaggaagcttcctttccagaggctcgtaagggaaatcgctcaagacttcaagaccgatctacgcttccagagcagcgctgtctccgctcttcaggaagccgctgaggcctacctcgttgggctctttgaggataccaacctctgcgctattcatgctaagagggttaccattatgcccaaggacattcagctagctcgtaggattaggggcgagagagcttag

SEQ ID NO: 435 - DNA, 4335 bp, Glycine max
aacgatctcaaagtcaccgctgattaagattttccttgtctaatcaaatattaatcatcatcttgcggaataatattgttcattgctccccttcacacgagtggcccccacaataacaccgaccccacacacgacaaagcaacatgtccgtggggccccacacttgagatgaaaacaactcagcgttgaattccttctttacggtttacgtacttcttaaccatatgtagctctatgtctttcaagctaagttatatgatgtgtgtgtatctatctatatatagatccgttattaaattccgatctgtattctgtcacattttcaacgttaactgttaagttactatcacatttattgattaaaatttattaaaattaaacttacaaaattttgtaattttaataaattttaacagcggtagaaaccaagttcaaagaattcctctagagaaacatgacaatgctttcgggtaaattagaaagacataatatacaaaataatgatgaactttattatgattattttatattttttcaataaacatgaatttcattatagaatatagtacttattttgtatttttctcttataacgttatggtatataatatatatccttttatttatctaaactctatcttcaccctattattctattcttttgaagtaagtaaaatttggtgctccaaagttgaaacaaattaaacttattccactccgtttttcatgtttgtgctaaaaggatataatacttgtcccacaaaatttaatttaatctacttttataaaaaagtacagattctgttgtgacttgacgacaattcagcaaaatgggtgtatcagtttgtttcatatgaaggaaaaaatggatcaggaaatgagtgaaaaaccagctgaagttgtgaggtagttttttattttttatttttggatagaagtaaatttggaagagggaggttgaagtgttgttttcagttagcaaggggttactttctgcaaaggttgaggagtagatggttccttttttaagcttcaactgaatcaattcatatcttgatgtttatgttgtttttatagaatagactcatttggataggtctctatcgtccaattgtgtgattaattttcttcccacattgctctttattgttctccaataatgagaccttgaggttggtgagcttgcgaccccattactctaattcactttttttttttttttgctttgtttcagtttaattagtgaactactagtttctttccaaaacaaggaaaaacgtgcataatttgaggggaaattacaaaactttgcaaaccctcttactagctatattattagtcttagtctttgctttctcagatgctcatgatcatcatggctttctttctttttgttttgttttgctgctctgactttctttaatttgcaccaaaacccttttcttccatctccaaaatctcagtatttgcagaattgtaggtggaaactatgatggtttcttttggtacattccattcatagacttttggaggctgttttcgagtcacgcttctaccagttcactatctgagttatttatttttgtggtgtaagatactaagatgtagcaattatgtcggtccacctgcccttcaattgtaacattattgcaaattgcaaattggttgtctggcttataatttatgagttcaaagcactctctctgtgttactattccaaacagtttactaccatctatctactctactaaattttcaagccttcaatgcttcttcatacaatgctttgttgtcaataacctccccattgccatcactttatgtttgtttagtacatggtactgagagtgaataacttcgactctgatgcttgttggacaactcagcatttgttccttcctaccctttttaccttaatcacatacactggctgtaaaattagttggtaatttttggattggtttatcttgtggatcaccttagctttttgcttccacagatgaggattggactcaggatacttgaagactaaccctgttcttcttaggacagtgtatgggttggaataaatgaagccgcagctcaaaattgctcttgctttagttgttagcttgctttggattcagcaatcattttgtgatgaaacttctgatacatctagcttaaacaagtggaggtgtagatgttctttccaagggaaccaaagctattctcttgctaattgttcaaaatcatgtgattgcttctcagattctgaagagagtgcatctgtatggacatgcgtatgtgattccaatggatttccccaagtggcagcagatggtcatagctccaattgctttaatgcttgcaactgcacttggggaaccttcagcaggccgggaggttcaaagaagcatgtttccagcaagattgttgtagttatactattaatatgtgttatatgcacgaccatggcatttcttgtctcacttatatgccatgtctaccgaaaggacagatgtacaattcactcaccaatattctcaatggataaggaaaccagtagtggtagtaccaccaacttaattagtcatagatcagggacttcttcagtgccagaaacaaaatatgcaatgaattctccaatttatcatatcacaggttgttttcagaaagcctctttcttttttgggaacccaaaagaaacttatcatgggaatatttttccattttcgttagccgaactggaaaatgcaacagaaaacttttcatcttccaacctaattggggtaggtggaagtagttatgtataccttggtaggctgaaagatggtagcaatgtggcagttaaacgactaaaagatcaaggagggtcagaagcagactccgcatttttcaaggagattgaactattagctagacttcaccattgtcatttggttcctttgcttggatactgctcggagttaaaaggaaaacatgttcagaggttactagtatttgactacatggcaaatggaaatttgagggactgtttagatggagtttctggaaaacatgtcgattgggcgactcgtgttatgattgcaataggagctgcaaggggcttggagtatctccatgaagcagctgctccaagaattcttcatagagatgtcaaatcaactaacattcttctggatgaaaattggcaagcaaaaataactgatcttggcatggctaaaaacttgagatctgatgacctccccagctgttcaaattctccagcaagaatgcagggaacatttggctattttgcacctgagtatgccattgttggtagagcttctcttgagtcagatgtcttcagttttggggtggttcttcttgaacttatcagtggtcgccatcccatccataaatctactggcaaagaagaaagccttgttatatgggctactcctcgcttacaggatagtaggcgagtaataagggagttggttgatccacaattgaaaggaaacttcccagaagaagaggtgcagataatggcatacttagcgaaggagtgtttgctgctggatcctgacactcgaccaaccatgagcgaggtcgttcagattcttttgagtatttccccgggaaaatctaggaggagaagaaacattccagccagcctctttcaggaaccagaggatgcagaaaagcaaaggcaatctacacccagtaaatttccaacacatagttcattgccaatatataatgatcacaatctttctgttgagaacaaaaacaaagcagaagatgcagtttcagctgagaatatggagagtttgatcctcttgacttcgaaatctgacggttctcgtgcatcagaagaggaaatagtagacctgactgagcctaggtttgaatcattttgcatcacaaatggcaatgccccatgaaaaatatacacccggcacgggcagagagatgcagatggcagaagcctgaggagtttatgttgtgtgaactggtggtacacctctgttgcttgttctaccacccgtcactgtgcatggctctatgagatatcataagagatgctgcaattattctgttttaattatcttggtctacatgtttttttcatgttttgaaaggaaaagctcacaggtgttgtttgatgagcactgaaaagtattcgtttgtttcttgtacagaaaatcataggatgataggaaattctggttcttctttatttggagaggaaccggatgacatacacattaaattaaaggttttggtcacagaaataattgtcttacaattatatttgataccaagtcttcttgaagtagatgaaataaactttcttaataatgcacaatc

SEQ ID NO: 436 - DNA, 1832 bp, Glycine max
aattatagtatgggatacgttttggtggcatttcagatttggtgttatttttcaacgtagtatcggtggcgggtatctcggatttaaaagcgtacgcaactgggaataaaacccaagacactattattctgttacaactcaaggattgaattgaaccaacacccttttacttgatattattattgtaacgctactttaattaggaaaatgccggatgttcaagcccttgttaatgattttgtgaatctgcttaagaaacgaattgaagggtctcaagccacagcaaagcagacagcagtgttgctacgctcggtgatttcacagcagcgggtgccacacacaaaccaggccacagttctgattaatgcagtaagggcggtgggggagcaaattattgatgttaatcctattgagttagctgtgggaaatatcgtgaggcgtgttttgcacattataagggaggaggatctttcccttgtgacagatgctgtggctggttttgggatgtttgctggaagtgatgatgaggatgatgttgagcgagatgattatcctgctttatccgcggcttctgttgcagctgctgcaagaagcacctcgcgtccaccgtcattgcaaactcttcttgaggatgtgactgattcagctgttgttccaccaacaccttcatcaggcggtgactctgaagggataagtagaactcttgaaaaaggttcaagtggtcggaagttgaagcatgatgtcattgaagcagtcaatgaactcatccaagacataacctcttgccatgaacaaatagcagagcaggcagtagaacatattcatcaaaatgaggtaatattaacactaggtagttcaaaaacagtgttggaatttctttgtgctgcaaaggagaaaaagagatcatttaaggtcgttgttgctgaaggtgccccaagatatcagggacaagtccttgcaaaagaattggctgctagaggcatacagaccacagtaattgctgattctgcgacttttgctatgatttcccaagtgaatatggttatagttggagctcatgctgtcatggctaacggtggagtaattgccccgatagggttacatatggttgcacttgcagctcaaaggcatgctgttccttttgttgtacttgctgggagtcacaagttgtgccctttgtatccacacaatcctcaagtcctactgactgagctgagatccccatctgagcttcttgactttggggaattctcagatttgatggattctgcaactggttctggttctcttcatgttgttaacccagcatttgattatgtgccaccaaaccttgttagtctctttattactgacactggagggcataacccgtcatatatgtaccggctcatagctgattactactccgctgatgatttggtagtgaaacaaagacctactacagggagttgagttcagctaccccaatttttttcctacaactgtcgttgtgatgctatctgaggctgaggaacctctggattgtgacatatatgcatgatcatttgtgcaaatagaaaataaatctcgtgtaatgctggggattggggtggagaaattataacagggaaaatgatgagggaaaataccaagtgaaactaggaaaattccaatttttttgtggttgttggttttacggtacatttttgtttacacataaagaaatgataatagtttcttagtcgttatagataaacatcttgtctagtttatttcaattgtttaaaagtgtggttgcgacagtaacttttttttgtaaggaatttttttggaaacataaatccaagtggaag

SEQ ID NO: 437 - DNA, 1740 bp, Glycine max
atgtgtggcatacttgctgtgcttggttgctctgattcatctcaagccaaaagggttcgcgtccttgagctttctcgcagattgaagcaccgtggtcctgactggagtgggctccaccaatatggtgataactatttggctcatcaaaggttagccatagttgatccagcgtctggtgatcaacccctcttcaatgaagacaaaactgtagtggttacggtgaatggagagatctacaatcatgaagaactcaggaaacagttgcctaatcacaccttccgtacaggaagtgactgtgatgttattgctcacctgtatgaggagcacggagaaaactttgtggacatgcttgatggtatattttcgtttgttctgctagatactcgtgacaacagttttatagtggcacgagatgcaattggggtcacttccttgtacattggttggggtctagatggctctgtctggatttcatcagaattgaaggggttgaatgatgattgcgaacattttgagtcttttccacctggtcacttgtactctagcaaagagagagcgtttcgcagatggtacaatcctccatggttctctgaggctattccctcagcaccttatgatcctcttgctttgaggcatgcctttgagaaggctgtggtaaaaaggttgatgactgatgttccctttggtgttttgctctctggaggtttggactcttcattggttgcagccgtcacggctcgctacctggcaggcacaaatgctgccaagcaatggggaaccaaattacactctttctgtgtaggccttgagggtgcacctgacctaaaggcagcaaaggaagtagcagactacataggtactgtacatcatgaatttcactacactgttcaggatggcatagatgccattgaggatgtgatctatcacattgaaacatatgatgtgacaacaattagagcaagcattcccatgtttcttatgtctcgtaagatcaagtcattgggagtcaaatgggttatatctggagaaggatctgatgagatctttggagggtatctatatttccacaaggcaccaaacaaagaagaatttcatcaagaaacatgccgcaagattaaagcactccacaaatatgattgcttgcgagccaataaatcgacctttgcctggggtctagaagccagagtgccatttttggacaaagattttatcagagttgcaatgaacattgatcctgagtataaaatgattaaaaaggaagaagggcgaattgagaaatgggtactgaggagggcctttgatgatgaagaacatccttatctgccaaagcacattttatacaggcagaaagaacaattcagtgatggagttggctatggttggattgatggccttaaagctcatgctgagaaacatgtgactgatagaatgatgctcaatgctgctaacattttccccttcaacacaccaaccaccaaagaagcatactactatagaatgatatttgagaggttcttccctcagaactcagccaggctgagtgttcctggaggaccaagtgttgcatgtagcacagccaaagctgttgagtgggatgctgcttggtctaacaaccttgatccatctggtagagcagcacttggagtgcatgcatcagcttatggaaatcaggtcaaagctgtagaaccagagaagatcataccaaagatggaagtttctccactaggagttgccatatag

SEQ ID NO: 438 - DNA, 3764 bp, Glycine max
ttcaaacatcaaaccgttggtgatgtttgaaatgtgtctcgttttggcaatgggtaactgatggcacttcgcccatgaagagtggagagaaggatgagaagaaacccacatggtgtttgggttgcatatggtttagtctattgaggaagcaatgtagaacaaggttattgcaacattgtatggaaaagaaaaagaactatggtttcattttgagacgtgggaagtgggaaatggtgtgagctagattggttgctagttattggttttcttgtttttgtttgttttgttttgttttgggggttgaggaattgagtgttggtggatcgagagcaatggagtctcggatggatcagtatgagatcatggagcagatcggtagaggagcatttggagctgctattcttgttcaccacaaggctgagaaaaagaaatatgtgttgaaaaaaataaggcttgcaaggcagactgaacgatgcagaagatctgctcatcaagaaatggctcttattgctcgaatccagcacccttacattgtggaattcaaggaggcatgggttgagaagggttgctatgtctgcattgtcactggatactgtgaaggtggagacatggctgaattgatgaaaaaattaaacggtgcttactttcctgaggagaaactctgcaaatggttcactcaattactgttggcagtagattacctgcattcgaattatgttttacatcgtgacctaaagtgttccaacatctttcttaccaaagatcaggatgttcgccttggggattttgggcttgctaagacactaaaagcagatgatttggcttcttcggtggtaggaactcctaattacatgtgtcctgaactgcttgctgatattccgtatggattcaaatctgatatttggtcactcgggtgctgtatatacgagatggctgctcatcgccctgcctttaaagcttttgatatggcaggactgataagcaaagtgaaccgttcatccattggccctttgcctccatgttattccccttccttgaaaacactgataaagggcatgctaagaaaaaatcctgagcatcggccgacagcatctgaggtgttaaagcacccttatttgcagccttatgtggatcaatatcgtccgtctttcagtcctccaacaacctgttctcctgtaaaaccaatttctgctgtcaatgatcatcgaaaaaatatggctgaaagtcaaaacagtaatagttcaagtagtgacaaagatactttgatgtcaaatgagaaaaacattgcaacagcaggaccaaagtgtgataacgaagccactgagatggatcaaacatcaatcgatgatgatggctcagatgaagaaagtggttcttgtaatgtcaatgccaaaacagctgagcaagaggtggttgaaccatctcataacaaacaccattctaacgttgaatctaagcagccaaaaacaattagaaatataatgatggcattgaaggaaggaaaagttagagaagcaacttctccaatgagaggcaaccgcataaagcctagtggcctatcaacacaaaaaataagcacagagacattatctaaattgcctaagcctacttttattgctcctagtatgaagcctaatttagaatcacatgctgcacttgcaagggcaagccctgaccctgcaaaaagaatgatgggatcacattatccaaagcatcagattctgatgacagaagcctcaccaaaagttaaagctagacatgatttcactccaccatctgcacttgtcaaacaagtagaaggagatggagtttctccaaggccaagacaaaggactcccccaagcttacttagaagaccttcattttctggaagaatgaggctggctggaattgatgttccaaatgcagcaaatgatactgggaagctaggcacaaataaaatagtccaggaacctcagatgagcccttgtcaattggccaatggcaatgtaccacatatttcaagacaggttactactagagagcctcagaaggcttttgaaagaagttccaaaggattgcaaacagacagcagcaattctgcctcatcttcagtttctatccaaggatgtgaacttgctgatgatgcaacaactttcattgacatgagagaacagatgcttcctaatcatgagaaagtaaaccacattgtaggtgttgaatcatgtcctgataggagccaacctacaacttgtgcacattgtaagatggttgaaaaagtgcctaaagaaacctgtgaggtttccacgaattttcagaatactattagtagtaatgagaaagtgagttccagtttaactctagatcaccaccatgttgaagattctaaggtaacacttgcttcagaaggtggtcttgtcataaacaagacaactacatctactactacctccaactgtgatgatagatctgtagaaccctctgctggagccaccaaagaaataaaagattttcaagatatttccaaggaaatgcctttaaccaagtctcctaaggaaatcaaggattttcaagatatttccaaggaaatgcctttaaccaagtctccaaaacaagcacccccaagttctggagaaaaatctgttcatgtagaagttagtccagtaagtgaaccagatatagttagccagccaacacttggatgcaagccccctggtgatgacaaattcacagtgagggagcgactgtcaccggtggctgaaactgttcctgtggtcaccactactaaatcatcaagccagaaagtcttgcaagagaaaggaactttgttgcagaatccagcacaagaaaggcctgacactggccatcttcctccagcctttgatgatgttatccatgtcatacgccacagtagttaccgcgttggaagtgagcaaccagtgaaggaatctgtggagatgggagttcaaaatgtagatgttggtaagttcatcaatgtagtgagggatgatttagaaatgaggaacataacctcacctttgacccccctcaaatcttcaagttgctctgatgctgcaagcttgaaatcaaacatttctgatcagccggaaacgaagaactcgaacactcctccaatccttaaatcttcaagtctcttcgatgcttcgagcatgaaatccagcatttctgattatccaggtcttaagaaacaagatgtgagtaaccctcctcctttagtttcagaacctgattctgctgaggccagtaaatgcaacactcctgtaaatgaagagaaactaccggtggcaaaggaaacattggatgtgaaatctttcaggcagagagcagaggcacttgaagagctcttggagttgtctgcagagttgctgcagcaaaacagattggaggaacttcaagttgttctgaagccctttgggaaagacaaggtctctccaagggagacagccatttggttagccaagagtctcaaaggaatgatgtctgaggaaagtgggggacgctcttcatgatgaggtatctccattagtcaattcttatgtgataagtttcactttgtattttatgtttaaaatttgctctttatatagttcatagctattcaagtaccacttgaattcataagagagaacatgttggctttgtcccttctttcattgttgtaattcttacagtgcttttatgctgttgtaaatagtgaccatacaaattactaacatcaaattacgatcaattgtatggacattccgtgccccggcataggtgtt

SEQ ID NO: 439 - DNA, 3648 bp, Glycine max
aacgatggtcgtttaataaccaccttcattactagcaataaggagtactatgacgggtcccgtgttgaccatagtagttgtattggtaatccaaagacagtcttttcattctgattgtctttgaataagctttttctcttcccttcaaaatccagctcctaagctcctcgcatattatctctctctctctaaaatcacaaattacaaaattccttccattttctctctaaaaccgtcatgacctccattgcgcctcttgtcctccctatctccaacccccaaaccaccgcgggaacctccagtgcaggcggcggtgccatcgaggttccaacgaacaacctggccttcggcgatcatcaccctccgcggttctctcttggatcctcttcggggccccaacaatgccgtcgccaagtgacgcgcctcctctgcgaagaagcgtgtggttattacggataaggctcgcgtcggtgttcaggaacgacgtggaggggttatatgagaagcttctcgctggtgagagcagcatcacccccatcgaccgcttcgacgcctccaagttccgcacgtgctttggcagccaaatccgcggcttctccgccgagggctacatggacgacaagaacgatcgccgcttcaacgactgcctccactactgcattgtcgccggcaaaaaggccctcgaaaatgccgacctcgccccaaacaagcactccaaggattgaagttttgctgctctggtacagcgtttgttgagaattttattttatgcagacatggaaagggggagaggatgccaaccatacctattttaacagcaaggctatgctatgttatgagtttaatgcagaggcaaatcatgatttgtgtcccaagtgtatatatgcgtatgtcccatcggtgatactgataaagcgtcctccatatgaagaacccctggattggccaactcggaaaagagtagctttgggatctgcaatgggtctttcatatttgcatgatcattgtgacccaaagattattcatcgtgatgtgaaggctgccaacatattgctggatgaagagtttgaggctgttgttggggactttggattggccaaacttatggattacaaggacacggtgaaaattcaaaaaaacctggggctgctcataatgttcgactatattcaattgcttccacaaggtatggggacttttttgatggaaaaactgccagcttgtgtgtgcgtcgtgctgtttattatgatcctgtgacaggaaaggaagatccttccaagaatggcatttgtagcaattttttgtgtaactcaaagccatgaaacaaaattcagatcacagtagtggttgtgtttgaagattgagggctatatatcttttgggtcgaattataattcgatcctcataacttagcattgatgcatgttgtgcttgaggttcaaggactatttatccttccgatcggatcacaatttgatctcacaatttagcctcaccttatgcttgagacttgaaggttatgtatccttcggattgaattatgcgaccatgcatttccttggttggactttatttgatctgtttgttttagtatataagtgtttgatccatttagtctcggaataataaatgtgtcgtaagactaacattggagacaatcatgtatccaaatccttcatatatgagagaatattttgatatgtcataatgactcaatccataaatattagaaataatatgcataatagactaagataaaaaaaggtcctctcattaacctagaaagatagattaaagaatacattttatttaagtgttttgaaataggtcactttcagaaaccttttctaattatgaagtacaaatacacacccacacacatacacccacccacacaccacacacgcacgcgcacacacacacacacacacacatatatatatatatatatatatatatatatatatatatataaaaatcaaagggtaaaaatacataattaagaattatgataaggaatcacaatcaatagcaataacgaaaccgaccaaatcaattaaataattgttgctattaattatttaatcattgttatacgattcaaaattattaaaaatcaatcaattaaaaaaaaggctcacaaaaaaaaaaaatcaaattttactaatttcaggaataagtttttgccaaataaataattaaataatacatctaatgtatccatctacagtgttttttgacaaataaaaacacatcaaatcatatggattatgaaagcaatggcaatactaggtggggttaatcttcaggcaactgcattccatgattaagtttctaaataaatgtaaagtaaacttagaaaagaaaatttccaaaagattataaaactaatttatttgcccacatgcactgcaaaatgcaaaaatactccctccggtatggttgcaagcaataaaaatcttttattttttttcttaaatataaattaatttcacttacgtcttatttttttaaaaaaaaaaactctctaaaatagttttcatttaataaggctaagaattattttagggtaaatagtcattttcgtccgtaaatgtatagaacagtaacagattcatctccaaacaacggaaattcaaattttagtctctgaaagtgaaaaaagtgcgacaaattcattcatccgttaacttccatctattaccattaatgaaagagcctatgtggctcggagggatgaaaatgcgacaaaaatgattgccaacatgtctgttgaatcaatttaaccaaaatgtaagtaagttttcattagaccaaaatgttaataagtttccattggaataatttgttaaaaaaaaatttcatttaagaataaaatatattttaatcttcatctttccactccccctttttatcgttgcaaatataactttaataatgaacataataatgaacataatatttattaataagcataatttgtccattgctcttaaatttctaatgtaataataccttatataaaatatgagactcaaacaaaaatacacaaccattaagttaattcttacaaaaaatgagatccaacttaattttatcactacctaatgttgtcgcaatagaaattttagagcaacagatacgttatgcttattaaccaatattatgtttattgttatgttttgtctaacttatgcttgtttttctatttttttaaagtacttattgtaatgttatacttgaaacgataaaaagtggggagggacggggaggaaaaatgaagattaaattatatgttacccttaaatgaaatgaaatttggagtctgacaaattagttcaatgaaaactcacattttggtctaatggaaacttagtgacattttgtttcaatatattcatcaactatgtaggctctttcattaacggtgacagatgaaaattaacgaatgaatgaatttgtcgcactttttcactttcggggactaaaatttgaattttaatattttaaaaacgaattttgtagcgctttatacattaagagacaaaaatgattatttatccattattttatgtttgatatcaaatttcaatgaatgatagtttagaaaaaattatttttaattgaaaataacaaaatttaatgaag

SEQ ID NO: 440 - DNA, 3555 bp, Glycine max
gccgtgaacaaaaagcaggaggggaagtttgtagatgaagcaagaccatattcagatggcaatctactatactaacaaaatgatattgcttatcttcccaccgcagaaatgttccttgctcattccctcttgtttgcacatcatcaataaaagaatgcaatgaatgatgatggttggtgaccaccgtgtggcgatattttctatttttatgttttgggatttagtcattctaaccgttgaaaaatacatgcaaaagtcattgactaagtaaaaggtattagttaatagttagccttagccaccttgaggacgggtttggtcttaccatcttttgtagattcagttttgtcatactatcatggctttgctttcacattaaaagatgattgctatagattattggtccactttgattatatttggtgatcattgctcccatccagaagtttcattcttccatttctgatccaacataagaaaatattgagcaatggaccaacaacataaagtgattcctctgctgctgcttcttttccaagttctgcttgtagcatcacagacagatagtcaagattattctggcctaaattctcttacggaatcctggagttacaagccacaaaattgggtgggtccagatccttgtggcagtggatgggatggaattcgttgcagcaattcaagaattacccaattgagactgccaggcttgaatttgggaggccagctgtcttcggcaattcagtctttatctgaactagatactctggatctttcttacaacacaggcttgacaggaacagttccacaagaaattgggaatttgaaaaagctaaaatccctatcattggttggttgtggtttctctggtcgtattccggattcaataggatctttaaagcagctgacatttctagcacttaattctaataatttcagtggaactataccacggtctcttggcaatctatcaaatgttgattggcttgatcttgctgaaaaccagcttgaagggactattcctgtctctgatgaccaaggaagaccaggccttgaccttctccttaaggcacaccactttcatatggggagcaataagctcactggtacaataccagaaaaactttttaactccaatatgattctcgaacacgtgcttttcgaccacaatcaactagagggtggcattcctagatcccttagtactgtgagcacattggaagttgtgcgctttgataagaatggattaactgggggagtgcctgcaaacttaaacaaactcggaaaactaagtgagatctatttatctcacaatagtctgaatggctctctgcccgatttttctggaatgaatagtctcacctatgtggacctgagtgacaatgatttcaatgcttctgatattccctcatgggttacaactctgccaggactaacaacagtaatacttgggcagaaccggctcggtggcgcattaaatctcagtcgctacagcagtagtctgcaactcatgaatttggaagataatgaaataacagaacttgacccagaaaacaactcaccaacttttgagctaagactagctaacaacccactttgtcgtgaaagtggagcttctgaaaggagttactgcaaagttccagtacccaatccctcattttattcaacaccaacaaataattgtttaccttcaccttgcggttctgatcaggtttcgagcccaaattgtaaatgtgcatttccctattctggacttcttatatcaagagctcttagtttctcaaacttcagtaatgcaagttactatagggagcttgagcagtctctgatggatacttttcgaaaccaaagcattccagtggattcagtttctcttagtaaccccttcaggaatactattgataattttgaattgactctggacgtcttcccttcgcaaaccgatcgcttcaacacaactggagttttaactattgcttttctgctaagcaaccaaatttacaaacccccagaattcttctccccttacatcttcaagggtgccaattatgaatactatggaggagaaccaaaaggatcaaagtcatcatcacatgtaggggttatagttggtgctgtagttgctgttgtggtctttgttgttctagcattctttgcagggatgtatgcccttcgccagaaaagaagagcaagaagatctgcagagttgaacccttttgcaaattgggaacagaatacgaatagtggcactgctcctcagttgaaaggagcacgatggttttcttttgatgatctaaggaaatacaccagcaacttctcagaaaccaatactattggatctggaggctatggaaaggtttatcaaggaaatcttccctctggggagctggttgccatcaaacgggctgcaaaagagtctatgcagggtgctgttgaatttaaaactgagatcgaacttctatcaagggtccatcataagaatctcgtcggtcttgtgggtttctgttttgagaagggtgaacaaatgctggtgtatgagcacattccaaatggcactttaatggatagtctctcaggaaagtctggcatctggatggattggataaggaggcttaaagtagcattaggtgcagccaggggtctggcctatcttcatgaacttgctgatccacctatcatacacagggacataaaatcaagcaatatcctacttgatcatcacctcaatgcaaaagttgcagattttggtctctctaaacttcttgttgatagtgaaaggggccatgtcactactcaagtgaaagggacaatgggttacttggatcctgaatattacatgacccagcagttgactgaaaagagtgatgtatatagctttggagtgctaatgctagaactagcaacagcaagaaggccaatagagcaaggaaagtatattgtaagagaggtaatgagggtaatggacacatcaaaagatttatacaaccttcattccattctagacccaaccataatgaaagcaacaagaccaaaaggtttagaaaagtttgtgatgttggcaatgagatgcgtcaaagaatatgcagcagagaggcctacaatggctgaggttgtaaaagagatcgagagcatgattgagcttgttggattgaaccccaattctgaatcagctacaacatcagaaacttatgtggaagcaggtgtaggaaatgcccaacatccttaccgggaagaagattttagctatagtggaatttttccatccacaagggtagaaccccaataggctttggtataattttctatttgtaattcttttccctcttcaaatgcaatgtctgagatctgctgtgtcaattttggattcaaatcaggcgggtgcttccaaaaaaacttgccctttgtagaaaatgaaggttcaagttgaattttttaaattgattattggaaggttgtacttatatctttgttctcgacttgtaaaatagttaataaattttgaactgctgtaatatttgaatgaatgtaagtaagatattcaacgttgaattttcc

SEQ ID NO: 441 - DNA, 1068 bp, Glycine max
cgtcaacagtccttaggaacgacacatgtctcataacttttgcacaaaaactagataagacctaaacaaaaaacaggtgtctaagataggtcaagcaaaaactgacacgtgcactaatgccttcaaatgcagacacgtagctctttaacccacaagtcctccaatcaaagcaccaaactaatctcattccttctaagtcctaattaacactttttctctataaaaatagaccaaggtcttattaatcttcaccatgaacaaaaatcaaagttacatagtactaataaagttatcactcatatcacaacacatcacattgtattaacacattgtattgtagtaaacttacaaagtaacttgattgaagatggttggaattggagttccaatatgcgtgcaatgtggcaacacgagcaacccctgccggtgcaaggtggtggggccaacgctggggttcctggcgtttgcggcggcggcggtggtcgagtggccggtgggggctctggtgtattgctttcgccactcaaagggtcgcaaaatcatgggtcatcccgctaccgtcatatacccttcagtcaccaatgccatccccatctaattaaagttctaactctatatatacatatatatatatatatatatatatatatatatatatatatatatatatatatatatatatgttaataatgttgttatataccagtatatggttttgatgcatggtatttacgactgtattaatctattatatacgttgtccttccttttttaattagtgacttacagttgcgtaccaatgcatgttatgtgtaacgcttggattacgcagttgttcagttaatttgccttttaggtatgtatcacataataaacttgagcaatctttttttgcctctttttactttgataaacttatggaaggactttgttgtggcttatatatatactgaatttggcagtgttttcatggaaatggatgaagagggttactttatgcgtgtgattttttattggggtattttttttctattttgggtgaaaaaaagaaacagggtttctatcgat

SEQ ID NO: 442 - DNA, 1926 bp, Glycine max
atgttgcgtttttgtgttatgaaataatgttgttaccttcctctctctaacctgcaatttaacaactccttcgtttcttctttcttttttctaaaacctcaaaaccaaaaacacaacacaactttcgtaacgtgtctctcccttcttcccctcctctctccggttccctaattctgccctcactgcacccaattccaattcccctcacccccaattcggggaattagggtttcgccccattcattcatcgatgcaccaccaccatcgtcgctagggtttgcttcgatggcggaattggaggaggagcggatgggaggggatttcaagcccttctcggagggctcttcgtgctcgcgttcgatcagcgaaaccgtgaacggctcgcaccaattcacaataaagggttactctttggccaaagggatgggcgcgggaaagtacatcatgagcgacactttcaccgttggtggttacgattgggctatttacttctaccctgatgggaagaaccctgaggacaattccatgtacgtttcggtctttattgcgctcgctagcgacggaaccgatgttagggctctcttcaagttgacgctggtggaccagagtgagaaggggaatgataaagttcatagccatttcgatcgccctctagagagtggaccttataccttgaagtataaaggcagcatgtggggttacaaacgcttcttcagaagatcactactggaaaattcactgtatctaaaaaatgattgccttgtcatgcattgcactgttggggtcgttaaaactcgttttgagggatctaaacagggtgttatcgtgccacagtcagacatgggccgagattttaaggacttgttggaatctgaggttggttgtgacatagttttcaaggtcaaaagtgaaagcttcaaagctcataagttgatacttgcagcccgatctcctgtgtttagagcgcagttttttgggcttgttggggatcctaccttagaggaagtagtggtagaggatattgagccctttatcttcaaggcaatgcttctcttcatctactctgacaaacttcctggcatatatgaggttatggactcgatgcccctgtgctcatacactgtcatggtgcagcatctcttggctgctgctgatctctataatcttgatcggctcaaactgctttgtgaatcaaaattatgtgaagaaatcaatactgacaatgtggccacaacacttgcgctggcagagcaacaccactgtccacagcttaaggcaatctgtttaaaatttattgcaaatcctgcaaacttgggagtgatatattattacaccttgtgcagctgtaatgcagtcggaagcttttgtgcatttgaaagagagctgcccctcaatgctgttggaattgctggagacatttgcatcagtggatgataactcaggccagacattaagcagaaagagaagtggcagtagcatatatggtcaagatttagcagatggggcagctgctgaatcagttaatccgaatggcaggcgagtaaggaggcggacataagcatagtttacaatctgaatatgcaaccgttgaaagtgtgatatagataacccacactagtcctgttaatataagtgattcaccattttcatttccacctgatccctgagattttatgtcaagttttctggccttcgcaccttttctcaaggggctactttggacagcattttcaatggtagtttgacattagaacagttctaatgtagggtatatcgtgtttgatgacgttaataaaaaagtaaatagcctgatatatttgttttttataatgtcgtcttggaagaaaacactttcttaagtgaaaaaaatagatgaatgatagaacttggtttatcctcgaatgccaggatttgcaatgaaggttc

SEQ ID NO: 443 - DNA, 2210 bp, Glycine max
cattaacccatgaaataaacccacccagagagaaggtacaggtacaacaaaggaaggaaattgcataaaggcaacgaacacattgaacggcggcgccaccatggattccgagttccccaacaaagcgttaacaagcgtgcgtttttccgacctgaatccgccactctctgaaccggttctccaagccctatcacactccggcttcgacttctgcacccccgtccaagccgccaccattcccttgctctgcagtttcaaggacgtcgccgtcgacgccgccaccggttccggcaaaaccctagcttttgtcattcctctcgtcgagattctacgtcgctcctcttctcatcccaagcctcacaaggtgctaggaataattatatcccctacaagggagctatcaactcaaatatatcatgttgcacagtccttcatttcaacattgatgaatgttaagtccatgctcctcgttggtggagcagaagtaaaaacagacataaagaaaatagaggaggaaggagcaaacatattgattggcacgcccggacggctatatgacataatgaatcggatggatgttttggatcttaaaaaccttgagattttgattttggatgaggctgatagactcttagatatgggattccagaagcagataacttctattatatctctcttgcctaagcttcggagaactggtctgttctctgctactcaaactgaggctattgaagagcttgctaaggcaggattgaggaaccctgtgagggttgaagttcgagcagaaacaaaatcagaaaagggtcccgcatcatcaaaacaaccagaatcttccaaaacaccttcaggacttcacattgagtacttggaatgcgaggaagataagaagccatcacagctactagatatccttattaagaatcgctcaaaaaaaattataatatatttcatgacttgtgcatgcgttgattattggggagctgtccttccttgtctttctgttttgaaaggcttctccttgattcccctacatgggaagatgaagcagtctgccagggagaaagcactagcttcatttacaaccctttcaaatggaattcttctatgtacagatgttgctgcacgtggacttgacataccgggtgtagattgtatagtgcagtatgatcctcctcaagatccaaacgttttcatacatagagtaggtcgaactgctcggctgggtaaacaaggtcatgctgttgtcttcttattaccaaaggaggaatcttatgtagaattcctgcgtataagaagagttccccttcaagagagaatatgttctgatgatgctaccgatgttgttcctcagattcgttctgccgcaaaaaaagatcgtgatgtcatggaaaagggaattaaggcttttgtttcttacatccgtgcttataaagagcatcactgttcctatatttttaggtggaaagaacttgaaattggtaaattggctacgggatttggcttattacaacttccttcaatgccggaggtaaagcaccactcactttccacggatggatttgagccagttgaagatatcaatttggtggacattaagtacagggataaatcacgggagaaacaaaggaagaagaacctgcaagcaaagaaagaagccaaagagagagagccaaaacctcaaaaaccgaagaaaaccccaattgcacccactgccacgcggaagaaaacagcccgacagagacgtgctcagcagacaatggaagacgaggaagagttgatgcaggaataccgcttattgaagaaattgaagaaagggaccatagatgagaacgaatatgccaagttgacaggtgcgcaaggcgatgagatcattttccctcaagcactgttggtcgcagaaaatgaaccaccctcaggtttggcacatagtaatggttggaatcctttacccattttcttgagcatcatatcaaactcatggcaacctttgtcatacacggtcactgaaattgcctctctaacatcttcaccttctttaaagaaccctaagaggatgtcttcgaacccttgcacgggcaagcataggttccacttgtaattgctcagttttgtcatatatggcatgctcaactcaaagtctttcacaatgcccacgctcattatgaactctagctgcaactcatctttaaatagaatttcatttacggctt

SEQ ID NO: 444 - DNA, 2747 bp, Glycine max
tgcgtgctggatttggaatgggcacaaaaccatgatggtattgagctctgttgcgtgctggagttaaaatcagttccagaggacactaatcactcgtcatcccaagtgaaaattgaagaggcaaacacgtgatcactctttagcctccagtcttcttgttcttggcttttaaattttagtgtcatggggtttctaaggtttataagaaggtatagtttccccttcaaggacaaaactcgaaatagagcatatgcacttcagcatatgcaaagcagaggcttctcaaaggatggagttcttaatggtaatgatgtggtgcatccagttctgatcattggcgcaggacctgtgggtcttgttctttctattcttctcacaaaattaggtattaattgcacagttttggagagaaacaaggcattttcaaaacatccacaagcacacttcatcaacaatcgatccatggagatattccgcaaaattgatggccttgttgaagagatccaaaggtctcaaccaccagtagatttatggaggaaatttatatattgtacttccctctctggttcaattcttggatcggttgatcacatacaacctcaagatcttgagcattttgtcagcccggtctctgttgcacacttctcgcagtacaagctaactatgttactactcaagcgacttgaaaacctaggcttccaaatatgtgcgcctgaaagtttggaaggaaatgaacagtcttgtgagaaaaaaataatgatgggccatgagtgtgtttccattgatgccagcaatgactttgtaacagtaactgcatcttctatcattaaagggaagcgtgtagaacagaacattcactgtaacatccttattggtacagatggtgcaggaagtactgtaagaaagcttgtaggaatagaaatgagaggtgaaaaggacttgcaaaaacttgttagtgtccatttctttagcaaagaccttggacagtttttgcttaaggagaatcctggtatgcttttttttatcttcaatgctgaagctattggggtccttgttgctcatgatctcaggcaaggggaatttgtattgcagatacccttttatccacctcagcaaacaattgaggatttcaatccaaaggcatgtgagaaattaatcagcaaacttgttggtcgggagtttggagatgtagatgtaattgatataaagccatgggttatgcatgctgaagttgctgagaggtttatatgtagtggcaaccgaatattacttgctggtgatgctgctcatcgatttcctcctgctggtggatttggaatgaatactggcattcaggacgcgcataatcttgcctggaaaattgcttctgtgattaagggtattgccccaacttcaatgctaaatacctacgaaattgaacgtaaaccgattgctttattcaatacaagattaagtctagaaaactataaagctgccatgtctgttcctgctgcacttggtcttgatccaactgttgcaaacatagtacatcaatttattgttgatgggattggttccatcttaccatctggtttgcagaaggtagctttggatggaatttttggtataggtcgtgcacaggtttcagaatttgtcctaaatgaaagtaaccctcttggatcctcaaggttggctaagctaagacatatatttgaagaaggaaaaagccttcaacttcagttccctgctgaagatcttggttttaggtacctacaaggagcacttatgccagagagtaaagatgttgaaagtcctccagaagtactaacagggcgtcggagggactacaccccttcagcacaaccaggatcaagactgcctcatatatttgtgagagtaaacccgttaagtgaggagactgtttctacacttgatcttgtgtcgggagataaagttgagttcattctcatcatagcacctgtggaggaatcttatcatctagctcgtgaagcattcaaggtggctgaggaacaagaaatttttctcaaagtttgtattttttggtctactgattctgttgaaggacttgagaaaggaagtaaagcagcattatcaccttggaagaattacctagatgttgttgaagtttggtcatcaacttcaaattggtgggatatgtgtaacatgacgaacagaggggctattttagttagacccgatgaacatattgcctggcgtacaagttcaggacttgctggggatcctagagtggaaatgcagagggttttttctgctatactgggagtacacggttcaaataaacaaatacacggatgattttgtattgattctttcaagaatatttcctggcgtgcaagtttaggacaatgatggggatcctagaggagaaatgcagagggtttttttctgctatactgggagtgcactgtcatacaaatacacagaatattttgcattgattctttcaagaatacttttccttttcttttaaaagtagttcaactttttatggtcacaggttccaacaattaaaacaatctctctgcttccgagggttagacgcacacatctggccatgctcagtttctttgaccttcaatggtagtagcctcaccgagctgtcctgatttaaatatttttttttattgacaaatgatagttgttttaattgttagtgaaataaaatggaacccatgattttttttttaattatcaaatcaatcttaaaattttctgaaggttctttg

SEQ ID NO: 445 - DNA, 1805 bp, Glycine max
ggaactctcatgaatgaatatgatatagttgcgtttggagcgaaacagaacagaacagaacagaggaaagacattgatagattgatcatcgatgaagagggagaaggagaaggagaagggcgtggctgtgacaagccctgtgagtggcgaagacagcgatgataagcaacgcccttcctttccctccgtcagattctcttcccgcaacgcttcctccaaatacgatttcgtcaaggtgaaggtgtggttgggtgataatgcggatcactactatgttctctcccgatttttgctcagcagaatgctaacggtaaccaagattccaaaccacgttgctatcaaaattgctctcgaattgaagaagctgctcacagataacagccttctagatgtctctcaatctgacttggaagtcaacctatttaagcttatggagcggcggggatatggagaagaatacataaatcgttacaagatgatgacgagatttcatcatcaaagagttccgttagtaatccttgtttgtggaactgcttgtgttgggaagtctactattgccacccagcttgcacagaggctaaatttaccaaatgtattacagacagatatggtttatgaattgttgcgcacatcaacagatgcaccattggcatcgactccagtatgggctagagacttcagttcatcagaggagttaataactgaattttgcagagaatgcagggttgttcgcaaaggtttggctggtgatctgaaaaaggcaatgaaagatgggaagccaattataatcgaggggatacatttggatcctagcatttatttagtggatgatgacaataaatcaccctctggtgtacattcagaaaataaagagataaatccagcatttatgacattggatgataatgctactgcacaaataaaagacattcatgtgggtagcagtgatgagagtaatggtggctccaggattttgagctctgatgaaggagtatctgctgaccaggttgatgtagtatcaaattccatggcatccatgggcctaactgaaagcatccctgaacataaagtttttcttgcagttgcttctcttagggaactggagacagacaaaactactattagtagggcgaagtcaggtcccaaaccaataattgtgcctattgttttgaagatggctgaatttgaccataaggcattacttgaggagtggatctctgctcggacatttaatgacaaatgtccagacctggataatgagaagcttatagccaacttgaaaaccatacaggattatctgtgctcattcacatcgcaggggttgactgtggtcaatgtatcggcaacaacatttcctcaaacattggattggctgcatggttaccttcttcagtgcatcgagcaaggtattaaagaaaatgttacaccagtagctccatcatagttcatgtaatgaatgcttccaattttgacagattcaacttcactttgtaaatggatgatgctggagaataacttatcaaatcaaaaggatcatggcttggggaaaagatagcagcataactgaataatagatgttgtaattattggattatcaacatttgctaccaaattaattgtatgatctatcatgtgttttgatgagaaatttcatgcttccattccattgcgttgtatgatcaacatcttgcggcataacaaatatcaacaaacatacacacccccaatccgtttgaatttaattatgcaattcatgcatggatgtacgatttgcttttaaggaaacttataaagatattgttcaa

SEQ ID NO: 446 - DNA, 2360 bp, Glycine max
cgaatgtctcatatcatttgtcctatgtcaacccgaacgtgatggctaccacctattcaccaaaccgtttcttttctcttttcttgttatatatataagaatttagaatgcaatgcatgcataagggaaaccttagcttgtataactttatattatatggtcacatttttctgattccctgaggctgcaaatttattaaccatcgtgaacatgaagaacctgaacatctctttgtgcatgcttctcgtagctcttgtgcggttagggggaagtgcaccctctggcttcaactatggtgatgctcttgataagagtttgatgttctttgaagcacagaggtctggtaagttaccactgccgcagcgagtcaaatggcgtggtgattctggtctccaagatggatttcaacaaggagtagacctggtgggtgggtactatgatgcaggagatcatgtgaaatttgggttgccaatggcctacagtgtcacaatgcttgcatggggggccattgagttcaacaaggaaatcgctgacttgaaccaaatgggacaggcattatgggcaattaaatggggaactgactactttatcaaagctcacactcagcctaatgttctttggggacaggtgggagatggagtttctgatcattactgctgggagcgtgctgaagacatgacaacttcaagaggtgcctacaaaattgatgaacaacaccctggctcagatctggcaggtgaaactgcagctgcattggctgctgcagctatagctttcaggccctacaactcttcttactctaatctcctgctagttcatgcaaaacagctcttcacatttgcagataggttcagaggtctctatgatgactccatatcaagtgctcagcaattctatacttcttccggttactcggatgaattgttgtgggctgccacttggctgcaccaagcaaccggtgatgaatactacataaagtatgtagtggacaatgctatgtatatgggaggaactggctgggcagtaaaagagttttcttgggacaacaaatatgctggtgtgcagatcctcctatcaaaggtgttactagaaggaaaggctggtgcttacgctgccacactaaagcaataccaggccaaggcagaatattttacctgcgcttgcttgcaaaagaatgatggttacaatgtccaaaaaacaccaggtggcttactatacgtgcgtgattggaacaacatgcagtatgtttcttctgctgcattccttttagctgtttactctaattacctatcagcaacaaaatcacagctcaactgtccagatggacaaactcagcctcaggagctcctcaattttgtcaagtcacaggctgactatatccttggtaaaaaccctgcggatgtgagctacttggtaggatatggagcaaaatatcctcttcatgttcaccacagaggtgcttccattgcttcaatctttgctctacactatgaggttggctgcacccaaggatttgagacgtggtataaccgtgctgagccaaatcctaatgtcatctgcggtggcctcgtgggtggtccagataaaaatgatgacttctctgatgaaagatccaattatgaacaaactgagcctacaatttcaggttctgctcctcttgtaggcatcttcgctaaactgcagagtttgtatggtaatcataatataggtgaaggttacaaccataatgaatcaccagtgccccagcaaaaaacaccaagtacaaatccagggaaagcaacagtgtccaagacatcatcagaatcagaaggtgccgcagttgaattccttcactcgataagtagctcatggactgttggaggtgcaacttattaccgtcacagggtgataatcaagaacacttcttcaaagccaatctcagatcttaagttggtgattaaggatctctcagggtctttatggggtctctctccaacagaagaaaaggacacctatgaacttcctcaatggcacaaggtcttgaatcctggctccgaaagtatatttgtatatgttcaaggcggaccccaggctaaagtctcgattaaaagcttacattgatcatttgtagtggccacattcactttttcaactcgtacgtctaatttgtttgacagctaaacttctgtcactccatgattgtaattttgtaatatcaatttggcaacccagtccatccatacctttcttgtccacacttaagttgtaatatcgatttctcaaagttccctatttatttgatcctacaaacaatctaacatatgaaaatgccatttgtgaaattaaatgaaaaggtcgtataacttgattgccagggaaaa

SEQ ID NO: 447 - DNA, 2984 bp, Glycine max
tcctccttactatattccaaacttcaatttcgagactcttacctttccagaccaaccgttagaaaaaagaataagttggttggtcttactcttttttatcgtcaaatgttagtgattagtagggggatttgaagttgcgaccttttctcattcttttctaccttcaccactagatcaaacttatatttcccttagtctttgcttcttggtttggatttctgaaacttcttatcttcaaacatgtggggtctaagataatagtaagacaatcatttttcttagccatcgttgtgtttgctctgcaggtctcatatataaatatgaaggaaaagagagacttttctgaatttgtgtcagaattaatagttctggctgatgaggttgcctcatttgctaagaatcctgaaattgagatagtagaggatgcttttactgagtttgccatgttggttgagaaatttgctccaatcttcaatgatttgagagacaaaagcaaaattatggacaagtcagctatcagaaagtcgttggaatctcttatgaatgagcttacccgggctaaagctttgatcagaagctcctctttgaaagagcgcatcaaacgaattgaggacatagcacatgatctcggtcgatcattaggcatgctgcgtgtggcaagccttgaagtgtccatagattttagagaaaagattggtacattacaaaaaaagctgatgaatgtgagatttggtgggaatacgagtctaacttcaagttcaatatcaacatttgtcaatgaagaaaaggtgggaggggaaatagaagaggagataaataatgttactggagatgatgttttactacacctcaagaatggtgatgctgaagaatttgcagttgcactcttaaggctaaaaaagttcatcaggggtggaaaactggatagcggtttaattaacgtggaagctgctgtttccattctttttaaccgtctattttcatgtaagacaggcaatagattgacaatcattcaattgctaagaagtgttgctttgcaaaatgatgagatgaaggtaaagtcctgcaatactatgcaggagaagatgacaaagaatgagttattatcagcagtggtgaaatctctaacaagagacactgaagagaggagggaatcagtgggactgttgctagaactctctgaccttcctgcagttagacggaagattggaagaattcaggggtgtattgttatgttagtttctatccttaatggagttgatcctgttgcttcacgtgatgcagcaaagttgttggatatattatcaaataatactcagaatgcacttcttatggctgaggctggttactttgggccactagtgcagtatttgaataaaggttctgacatgaccaagatcctcatggcaacaacactttctaggctggtgctcactgatcatagcaaacttacccttggacaagatggggcaattgagccccttgtgagaatgttcaattctggaaaacttgagtccaagttatcagctctaaatgcactgcaaaatctttccagcttgacagaaaatgtggaacgcttggtcaaaactggaattgtaggatctttgctacaacttcttttctcggtaacatctgtgctcatgactctacgggagcctgcatcagttatccttgcaagaattgctgagtcagaaactgttcttgtcaataaaggtgtcgctcagcagatgctctcacttttgaatctttccagccctgtgattcaaggtcatctattagaagctctaaatagcattgcttcccatccttgtgcctccaaagtgagaagcaaaatgaaggacaaaggtgcacttcagctaattttaccccttctgaaggaaacaaaaatgaaaataaggagcaaggcattgaatttgctatatactctctccgaagatctaacagatgagttgacagcacattttgatgaaacgcatctttttgacattgttaacattgtcttatcatcaacatcagatagcgaaaaggctgctgctgttggcatactgagtaatcttcctgttagtgataaaaaagtgacagatgtactgaagagagcgaatttgttgcccgttttggtatccattatggattcaggcacgagaagtaactcaccagcaaaaagtatcttaatggagagtattgcaggcgttgcaatccggttcacaagctcctccgacaagaaattgcaacttctttcagcacaacatggggtgattcctttgcttgtaaaactgctctcaagtggttcagcaatcacaaaattcaaagccgcaaccgctcttgctcaactatcacagaattctccgtctcttaggcggtctaggaagtcgaggtggttgtgtgttgctccctcagtgaatgcatattgtgaagttcatgatggttattgctttgttagcagcacattttgtctgatcaaggcaggagctgtttctccccttatccaaatattggaagataaggattgggaagcagtggaagctgctctgaatgccctttcaactctattgcaagatgaaatctgggaaggtggtgccaattacatagccaaattgtcaggtgtagaagctattgtaaatgtattagaagcaggtgatgtgaaggttcaagaaaaagcgctatggatgttggagagaatattcaggattgaagaacacagaatgaaatatgcagaattcgcccagatggttcttattgatatggcacagaggagtgattctagattgaagtctacagttgcaaaagtcttagcagtgctggagctgctactagttcaatcaagttatttctgatacaaagtgtatcactatgattcatgttatggcagtgaacttattttgggttccattcatttatatttttttgtgtacatgcgtgtatttaatcttattttatttgaaccacacagtgccataatggtattagtacatgtattttttttc

SEQ ID NO: 448 - DNA, 1587 bp, Glycine max
atggtgtctgcttgtgtgaccttgaaagccaatacccatttagtaaaatcgagaaaagacaatacttttcgtcaagatagtggttttttaggtgagagaatcaaagggggtctgaattacagtccctggatcattaaccaattggcctcaagtttgagaacccaagagagggtgaagaaggccaaacctggtgttgtttctgctgttcttacatcaagtaacaccaaagaatcagtggcttttcaaatgccatcgtttctcagaagaaaggctgatccaaaaaatgttgtttccatcatattgggagggggacctgggattcaactctttcctcttaccaagcgagctgccacacctgctgttcctgttggtggatgctacaggcttatagacatcccaatgagcaattgcatcaacagtggccttaacaaaatatttgtactgacccaattcaactctgcatccctcaatcgtcacatttcccgcacctattttggaaacggaatcaactttggggatggatgtgtggaggttctggcggctacgcaaacacaaggagaaactggaaagaactggttccaaggaacagcagatgctgtgaggcaatttacatgggtatttgaggatgccaagcacacaaacattgagaatgtattgatcttggccggagatcatctataccgaatggattacatggaccttgtgcagagtcacgttgacagaaatgcagatattacagtatcatgtgctgctgtaggtgaaagccgcgcatcagattatggattggtcaaggcagatggcagaggtcgcatcatccaattttcagaaaaaccgaagggtgctgatctgaaagcaatgcaagtagatacctctgtgcttgggttgccaccccatgaagcaaaaaggtcaccatatattgcatctatgggggtttatgtattcaagacagatgttttactcaagcttctgaaatggagatatcctacatccaatgactttggatctgaaatcattcctgcagcagtgagggaaaacaatgtccaagcgtattttttcaatgactattgggaagacattggaacaataaaatcattttatgatgctaacttggctcttactgaagagaatccaatgttcaaattttatgatcccaagacacccatttacacgtctccaagattcctaccaccaacaaagattgacaagtgcaggattgtggatgcaataatctcccatggatgtttcctaagagaatgcactgtccaacattccattgtgggtgaacgttcacgtttggattatggtgttgagctccaggacactgtaatgatgggagctgactattaccaaactgaatccgaaattgcttctctgctggcagaggggaaggttcccattgggattggaaggaacaccaaaataaggaactgcataattgacaagaatgcaaagatcgggaaagatgtcatcatcatgaacaaagatggcgttcaagaagcagatagaccagaagatggattttacattcgatcaggaatcacagtcatattggagaaggcaacaatagaagatggcactgtcatataa

SEQ ID NO: 449 - DNA, 3189 bp, Glycine max
tgatatcgtattatattcggtcactatttaaccaacttttttcggttcattgatggtcactgccagcaaaagcgagcccacaagcatatgcttgtcctgagctagatgcgtgttggcatgcgtttcatcttcggctctcatcatttgcattgaattcctttccattcaacaaagggtattcagatttgcgttctgcacttctgctctttggttctggtggagctctcaaggcagaaaagagaaaatttgagagaaaaggagaataaattgttataaacatgagggattgcagagaaatttgcttgttcatctgtgtcttatcaatcttgcccttggtatgtttttctgccaactttgttcctacagataattaccttatagactgtggatcaccaaccaatactccaatagatagccgcaatttcacagcggatagtttctataagaatttcctttccacacaacaagatattgttgccagtacctccttgaaatcaatcacttccaccagtgattcgcctctctattcaacagctagaattttcactgcaccctcaaagtacacttttcctattaacaaaaaggggagacattggatccgtctttatttctttccatttgcatatgagaagtacaatttgagtgctgcgaaatttgctgtttccacccagaactataatcttctcagtgactttagtgtgcagaaaaatcctgttatgaaggagtactctctaaatgtgacctcagacacccttgtgatcaccttttccccttccgacaattccattgctttcgtgaatgccattgaagttgtttcggtccctgatgacctcattattgatgatgctaacaccctaaatccagcaggaagctactctggcttgtttgcacaggcactggagacagttttcagggttaacatgggtggtccaaccatctcctccggcagtgacacacttcaacgaacttgggttcctgatgagaaattccttatacaacctaacttggcccgtaattttacaaatataggtgctgtgaaatatgtagatggtgggccaacagaaaatactgctccaccttctgtttatggtactctaacacagatgaattcagccgatgatccccgaagtaatttcaatgtgacttggcagtttgatgtggagcctcaatttcagtaccttgttcgacttcacttctgtgacataatcagcaaaagtctcaatgaactgtacttcaatgtttacattaactcctggtttgttgccaaggatcttgatcttagtacaataaataataatattttggctgctccgttttttaaggatatgattacagccccatctgccagcaccaaaattttcataagcataggcccttctactgtgaatagcaattatcctaatgctattttgaatgggctggaaataatgaaaatgaacaactctgtgagtagtctcagctcatcaacagctgtgcctttgtctagtacttctggttcaggttctaagaaagttggcttgatagtgggtgtgagtgttggggcatttcttgcagtggtcattgttggagttttcttttttctactatgcaggaaaagaaaacgtttggaaaaagaagggcattcgaagacatgggttcccttatcaatcaatgatggaacttctcacaccatgggaagtaaatattctaatgccacaacaggaagtgctgcttcaaactttgggtatcgcttcccttttgtgacagttcaggaggctacaaataattttgatgagagttgggttattggcattggtggttttggtaaagtatacaagggagagttaaatgatggtactaaagttgcagttaagagggggaatcctcggtctcagcaggggcttgcggagttccgaactgaaattgagatgctctctcagttccgccaccgccatctagtatcattgattggatattgtgatgaaaggaatgagatgatattgatatatgaatatatggagaagggaactctcaaaagccatttgtatggttcaggtttcccaagcttaagttggaaggagagacttgagatatgcattggagcagccagaggactgcattaccttcacactggctatgctaaggccgttattcaccgtgatgtgaaatctgcaaatatcctgcttgatgaaaacctcatggccaaagttgctgattttgggctatcgaagactgggcctgaaattgatcagacacatgtgagcacagctgtcaaagggagttttgggtaccttgatcccgagtatttcaggaggcaacagcttacggaaaagtcagatgtgtattcatttggggtggttctgtttgaggttctttgtgctagacctgttatcgatccaacccttcctagagaaatggtgaacttggctgaatggagcatgaaattgcagaaaagagggcaattggagcaaataatagatccaacacttgctgggaaaatcagaccagattctcttaggaagtttggagaaacggctgaaaaatgtttggctgactttggtgttgacaggccttctatgggagatgtcttgtggaatttggagtatgctctccaacttcaagaggcggttgttcaaggtgatcctgaagaaaatagtacaaacatgattggtgaactctctccacaggtcaacaatttcaaccatgaagtaagtgtttctgctgcacaatttgaagctacaagtctggatgatctgtctggtgtatcaatgagtagggtattctcacagctggtgaagtctgaagggaggtgattttgagcattacatcttctaaatttgcattatattactctttttttattattattttagtggtttgtcttctgaacgggtagttctcagcctccttgcctgcttgaggcactttatagacttgtaaagaaaggtcaagttaatgaaacaagtttgcttaattgtatcccaacaatacatttccctgttaaatatctgatttctggtgtttgagtagaattgtcttgaaaaatgaatgcaaattgtataaatatgttcttttaagtaccttgcctcatcagccagagaaacttctgaatggcaagtgcttatattaaatttgtcaaaaagccatgggtttcttttttgtacaagtggtgatagtgatacaaagttgtttttgaccaatagcctaaca

SEQ ID NO: 450 - DNA, 2452 bp, Glycine max
attatttcaagacaagtgtcttagtgaaaaacccaaaccaagccccattatttgggttgatatattccatttccaacatatggtcttcatgaagaagagtatcattaatttgtcattgacaaatatgcctcaatgtacgtgtatgggtgaatagtgaacggtgaacacttttactaattcagtgactcatctgaagcagcattcaacatttcaagtgaggttaattgaaaatggtttcaatttcgaagttgaagaagttctacttggtggagccattgaagtcatcttcccttggttttcattcttttgaagaaaccaagaagtgtgagagcattgttataaatgaagtggaaggaaagaggcaaaagaagcatagaaagaagcagtgtaaggattggaggtgcattgattattgcttttggatgatagggtacatgtgcaccacttggtggcttctctctttgttgtatggttgcttgcctgccatgttgcttggctttgaggcaccagtgtcacctggggtgaggctaagtcgtgagggagtcactgcacttcacccagttgttcttgtaccgggcattgtgactggtgggttggagctatgggaagggaggtcttgtgcagagggccttttcagaaagcggttgtggggtgatagttttgctcaaatcctcaaaaggcctttgtgctggttagagcatctctctttgcatgatgagactggtctggaccctccaggcattagagtcagggcagtgcctgggcttgttgctgcagataattttgcttctggttatcttctttgggcagatttgattgaaaatttggcaagaattggttatgaagggaagaatttgtttatggctgcctatgactggagactgtctttccagaatactgagattcgagaccaagcacttagtagattgaagagtcatattgagcttatgtttgtaaccaatggctataagaaagtggtggtggtaccacaatctatgggggctatttattttctccatttcctaaaatgggttgagacacctcctcccatgggaggcggcagcggtccgggttggtgtgacaagtacatcaaagcaatcatgaatgttagccctgcatttcttggtgatcctagggctgttagcaatatattttcaaccgaaagcagtgttggatttgtcagaactgtggcttctggcattttaaattttgattacgttggtcgtcaaactcttgagcacgccatgcgagtgtgtagaacgtgggattcaatcatctcattgatgccaaaaggtggtgaaaccatctggggtggcttggattggtgtcttgaagactggaataactatgatcaggaaatttcatggggaagtaattctgctacttttaacttatcatatgaggctgtgtggattgattgtgatgagatgagcagagaaagcattcaaaaaatttctaaaaaaagagcttatactgcaagaacagtttttgatatacttaactttgtggctccaaaaatgatgaagcgtgctgaggctcacttctctcacgggatagcagagaacttagaagatcctaaatatgctcattacagatactggtctaatccacttgaaaccaaactaccagatgctccggatatggaaatatactgtctttatggagttggaattccgactgaaagatcacatgtacacaagttctacccttctgaaaaggacaagagtattcctttccaaattgatagttcagcagatggagaagatggaagttggctacacaatggtgtttattttgtggatggtgatgagagtgtacctattgtaagctcagggttcatgtgcgccaaaggatggcacggaagaacacggttcaatccatctggcacggctacatatacaatagagtatcagctaaaacaaccaggtggtcttattgatcggagaggcctagagaatggagcaagttccaacattatgggaaatgctgccttaattgaagatgttttactagtagctgctggagccactggagtagatattggaggtgataggatattttcagatataatgaggatgtctgagaggataaatctcagactatgattgtgtttaatggttggattttcttgcatgataagagctgtagaagaaatatgcaaggttaatgcagaaatagagaatgatcactaacaaaacatgtatgtaggtgaaatctgatgacaacttgtgtaaccatctgccatcaagagaaagctgttgagtgttgagatttctgagattcttaagctggtaggatctaggatgcaaggacagggtagaagcatcaaatggggtcaacaatatatgaatgctaaattacacaacaaggagcacacgttaaacttaggtacccttaggtagaatgggaaaaaatgcaaaaaaaatagaattgagaacttttcactcatttc

SEQ ID NO: 451 - DNA, 4614 bp, Glycine max
agctattatgcgatgttctgcatttagttttattcgttttgtggaattcggtattttggatttagtggaattggtaatgtacgttagggagcgtcaactttcatcaatgttactggaaacttgtgcatttctctattgagcatcatccagtgaaggtgttttattaggcagttagtttcaactgttgtgatcttgtggtataccgagtaatctatgcagagatttacatggactggtttctggagggaattcagagattcagtttgatcttggggctttcttttgacctgccttctaagctttagtaaggttgacgccttaatgttgagttctgggaataacttgaacagtagcagcagcaacagtgggataacttcttcagatatgccacccttgccccagtgtttgccactagattcaattacagtaggcaatagaaaatatacaggagagctaaggagggttcttggtgtttctgctggaaacacatctgaagaccattcttttggaggtccacatcctaaacccatggctcctggagcctcaggggaattaaagcacttcaaagaaagtgtacaagatgcctccagaaaggcaagggatagatcaaaaatgtttggggaatctttgtctaaattggaaaagtacgaggcattgaacataaagaagcgacaaaggactgatttatcaagtgataggggaggtggagtaaacttgacaaagatgggtaaccagattcacaaaacccctaatgataatctaactcagagatcagaagcaagggcctcaaattcaatgctgaacaagcgaattcgtacatcagtggcagatgtgcgggaggaaagtaggtctgctgctatcggaaggccacggattgtcacagagaaggatggaaatccggttcagacactttgtgggagctctgttcgaaatgaagagaaaactcgcagattacttgctggaggtgaagggttggatcaaaaaataaagaagaggaggtctgttggaactgtaggaaacagagttataactggtgaaagggatgtaaaacgaactgttcttccaaaggcaaatgctgatttgaaaatgcgactttatgatgctcagggtttcagattgaagtctggacctggtggaatgaagtctgagggctcttcagagcttactaatacaagtgttcgcgtgatgcttacaagtgagcaaggcatttctcttcacagggaacacatagctgagcagagagttcttgcaaaaggaagcaataggggaaacactcaggaggacccagcaagcagccctaacacgctaataaaaaacaaggtatctcgggcaccaagaacaggttcagttagtgcactagaatcatctaacattcaaccttcatctacaacatttccaggttcttctattcatccaatgacccagtgggttggtcagaggccacctaaaaattcacgctcacgaagagtgaaagtagtttctcctgcctcacgcaatcttgaagttcaggtctcatccgaaggctgtctaacttctgacttcaatgtaaaagcttcttctgatggcaacaatggatttcaacttgctagcagtgtagacaacagtactccaaaatataaaagaccgcctgatgatatttcatctccctttggattatctgaaagtgaagaatctggagcgggggaaaacaaaataaaagagaaagctgtgaatggaagtgactttgctatggccgcagataaggctggggcttctgtgtttcaaatgaagaagaataagatatcaacagatgaatctggagatagtgtgcagagacaaggaagaagtggaaggaatttatcattagtaaggcctggcctcccttgtgggagggagaagtcagagaatgtaccaacaatgaagccagtacaggacatgaagcctaatgataagagtagaaccaaatatgggcgccctccttcaaaaaagcagaaagagcgcaaaattttgactcgtgtagggaagcaactgaacattagttctcctgattttggaggtgaacctgatgatgatcacgaagaattatataaagctgcaaatgctgctcataatgctagcaaccttgcttgttcgggtccattttggaagaaaatggagtctatttttgcttctatcagcttggatgatgcatcttacttgaagcaacagctcaatatttctgaggaatttgataaaagtttatctaatatgtttggcattgatcatgatttgttgagtgttgttataaataacaagcccactcaaggttcagaggaaagaaagagaagtcactgtgatgaagaatcaactaagtttgatgctttaggtgtaaagaaggacatggaaagactggacaaggttaccccagtattccaaagacttctttgtgctctaatcgaagaagatgaaagtgaagaatcatatcaccaaagtgatgcaaagaatatatctcgacaatgtgctagtgatgattctcactgtggttcttgtaatcaaattgattttgaacccaaagatcgggatagaatggattctgaagttgaatcagaggtggatcttcaagttcagaagaactgcatgttggatagactatcttgtgataagagcaccacgtccaacacatttagatacccaaacacatccagttctttacaaagcactggagtttggcagggagatgaagaattttctctttcagatatcacactcaccagtgaaatatgttcaaatgatcttgatcaactgcagcctgctgaattaactgttcctagctttccttcttctgatggccagtatcagctgatgccactggatgacagactgctgcttgagttgcagagcattggcttatatcctgaaatattgcctgatttagccgaggaagatgaagctataaatcaagatattgtgaaacttgagaaagcactgtacgaacagaatgggagtaagaagaataacttggacaagattgatagagctgttcaagaagggagggatgtggaaaggcagaagattgagcaagctgcatttgaccatcttattgaaatggcttacagaaagagattggcatgccgtggaagcaaaaattcaaaaggtgcagttcacaaggtgtctaaacaagttgcttcggcttttctcaaacgtactcttggaagatgtaaaagatatgaagaagctggcgttaactgcttcagtgaacctaccctacaaaatatcatgtttaccccaccttcatgtgagaaggatgcacaacctgcagattgcatggtctctgggacagccagcaatacatgtaacaaagcttcagttcaaattgaagccagaaaatcaggtgcagtttctagtgcttctgagaaatatgattgccatagagactatgcagacaggggaatggttgattcttttcaaggttcaattcagtcatcagagcaagcatcatccaagaatgggtccatgtttatcaaggaaaagaagagggaaatgttggtcaatggtggtgtcagtggttcttcctcaagagcatcaaatcttgatggtgctgttcatggtggagtgaagggaaagagaagcgagagggagaggaatcaaagccgggatcagagcagacaaaattctattggcagagctggacgcatgtcactggacagtagccaaaatgagaacaaaccaaaagctaagaagcaaaagagtactgctagtggacatgataggtttatggaagcaaaggaatctgctcgtttaccaattcatgatacaatcaataatgatagcaaagatggggctacgttatctggtaaccaggacacttctcaaataaaggaatccaatgactttgggaatttgccgctacctgacttaagttcaatagaagaatttggtggtgcgcaagatcttagttcatggttgaactttgaagaagatggtttgccagaccatgattctattggccttgatattccaatggatgacctatcggatttaaatatgcttatgtgaagggatgtacacgtgttatatctgaaggagagtttgtatgtactcagtgaaccttgtggggcgtcaagatcttgatggtatacttgggtttctctggaggggaaatttttgtgattggaattatgaattttgacacatttatagggtgaacgggagatggggagtgacttaaaattgcaatttgatatttttgtggacgttgtatagaggaagctacaatcatggatttcatgaaattgctgtcagatatctcccttctcccatgaatcaaactagttttgctgtgttaaagtcatgatctcagaaatggcttttctataggagattagattaattaaagtgctatagcctgagagtggtttcatttctgaagctgtgacttcagctaccatactatgtaaaatgtttattgttcttgtagaccgaaactcgcacaatgttgattgttttctcctgaataatggagaatgagtttttaattaagtttttctaggattaaaattagtaattaatcccttctatagaaacctaagactcgccattgacaacttactcgcttacgttatataactgaacagaaaaatgatttgtcttgactgt

SEQ ID NO: 452 - DNA, 747 bp, Glycine max
atggaagaagattatccacccgggtttcgtttcttcccaacagaagaagagcttgttggcttctacctacacaacaagctagaaggccaaagaaatgccatagccatagccatagacagagttatcccagttattgacatcaatggagttgagccttggaaccttccaacacttgctggggagctttgtcgtggggacacggagcaatggtttttcttttcgcccggtcaagagagggaaaccaggggaggcagacccagcagaaccacagcttgtgggtattggaaggctacaggttctccttgctatgtttactcttctcacaacaaagtcattggggtgaagaaatccatggtcttctacaaaggaaaagcacctatgggaacaaaaaccaaatggaagatgaatgaatacagagccatccatgtcccttcccaatccacccctgccacccttcatttgacatgtgaattcagcttgtgtcgggtatatgtcatatcggggagctttcgagcatttgatcgacgaccattagagaaagaaggagcagagtcgcgggttcatagaattgagaataattttggtggggcacgtgctcaccaaacttgccctcactctcagatgctagaagctggagaatcaagtatcacaaagtgggatgtgaataataataataataataataatgggttccaacttcaagaaccggtgtgggaattggaatgggaacattttaattggctctaa

SEQ ID NO: 453 - DNA, 4659 bp, Glycine max
aaaaacagaacgataactagctgagttgtttttgttaacccctctttctctctctctctctctcgcaaaccttccttccttacaactaggaaccggtgaacaccgttaattgcttacttaaatcaatccccggttaccgttctccgttctcagctctgtcctccgcctccattttctttcgtacgcgctcctctaccggcactttccggtcaccaactgcactcttcatactaccgaaataattgaatatcaataaacacatacatacccttcagaataataataatatataaatacctttttttgaaaaaaagatttgaaaaccagaaaaaaaaaagtagagagagaaagaccgacacgatccctttgtctcagagaaagaaaaacaattctttttattttatttttccattttttttaataattttagtttttctgctttgggttgtgacttgtgattgtgtgagagaaaatccactcaattcagattatctcctccgtcccgtttcgtttcgttcaccgcttctttctttcatttctttgattttcgcacagaaagagtgcgaagacacacagagagagaaagagaaacgaaaaaacctaatcgaatttccctcttttttttgttttgtgtgcgtgtgtcaaaatatttatttgaatttgaggagcggaggatctgagttagggtttccaatcgtatttttttttaaccgaatcggaatgttggttcgggacgcggtttcgcggcaattctagctccgatctcaggggaattgctcgaatcttagggttaaggaatggacgttgattcctcgatggtgccggagcccgatcacgatccgccggtgcagaaccatgccgagagagaccagctaggagagtcaccgtcgccgccgccgtcggagggaggcggatctccggcgcaaccgcaccaacagccgctgcctccgacggcggctcaggtgcaacagcccaatccgctggttggtccgaggctcgcgccgacttactcagtggtgaatgcgattttggagaagaaggaggacgggccggggccgcggtgcggccacacgttgacggcggtggcggcggttggagaggaggggacgccggggtacattggcccgaggctgattttgttcggcggtgccactgcgcttgaagggaattccgcggtctcagggactccttcatctgctggaaatgctggcatacgtttagctggtgccactgctgatatccactgttatgatgtcataactaataaatggtctaggataactcccattggcgagcctccatcctcaagggctgcacatgtggcaactgctgttggaaccatggtagttattcagggtggcattggccctgctggtttgtctgcagaggaccttcatgttcttgatctcactcagcaacggccacgatggcatagagttggtgttcctggccctggaccagggccacgctatggacatgttatggctttggtggggcagaggtatctcatggcaattggaggcaatgatggaaagagacctttggctgatgtatgggccttggacacagctgccaagccttatgaatggcgcaagttggagccagaaggagagggtccacctccatgcatgtatgcaactgccagtgcacgctctgatgggcttcttctgctttgtggagggagggacgccaatagtgttccattgtcaagtgcatatggacttgctaagcatagagatggtcgctgggaatgggctattgctcctggtgtgtcaccatctcctagatatcagcatgcagcggtatttgttaatgcaaggctccatgtgtctggtggggcccttggaggaggacgcatggttgaagattcatcgagtgttgcagtgttggacactgctgctggtgtttggtgtgataccaaatctgttgttaccagtccaaggacgggtagatacagtgctgatgcagcaggtggagatgctgcagttgagttgacacggcgttgtaggcatgcggctgctgctattggtgacttaatttttatttatggtggtttacgtggtggtgtcttgctggatgacctacttgttgctgaagatcttgctgctgctgaaacaactgctgcttcacatgctgctgcagcagcagcagcatctaatgtacaggccggacggctacctggacggtatggatttattgatgataggacaaggcaaaccatgcctgaaacagatcctgatggttcagtagttttgggaaatccagttgccccccctgtaaatggcgacatgtatactgatatcagcactgaaaatgccttgctcccgggatctaggcgaacgagcaaaggagttgagtatctagttgaagcatcagctgcagaagctgaagctatcagtgccacactggctgctgctaaggcacggcaagtgaacggtgaagttgaattgcctgaccgagaccgtggggctgaggcaacacctagcgggaaacaaatatcttccttgattaagcctgattctgctgggtcaaatagcattcctcctggtggagtgaggctgcatcacagagctgtggttgttgctgcagagactggcggagcattaggtggcatggttagacagctttcaattgaccagtttgagaatgaaggcaggcgggtcagttatgggactcctgaaagtacaacagctgctagaaaattattagaccggcagatgtctatcaatagtgtcccaaaaaaggttgtagctcaccttttaaagcctcgtggctggaaaccaccagttcgtcgacagtttttcttggactgcaatgaaattgcagatctttgtgatagtgcagaacgcatattttcaagtgaaccgagcgtgttacagcttagggctccaattaaaatatttggtgatttacatgggcaatttggagatctcatgcgcctctttgatgagtatggtgcaccatcaactgctggtgacatagcatacattgactatctattcctcggagattatgttgataggggccaacacagcctggaaactatcagccttctgcttgctctgaaggttgagtatccaaacaatgtacatttaatacgtggaaaccatgaagctgcagatattaatgccctttttggtttccgaattgagtgcattgagaggatgggtgagagagatggaatttggacatggcaccgtataaaccgtctgtttaattggcttcctctggctgccctaattgagaaaaaaattatttgcatgcatgggggtattggccgttcaataaatcatgtggaacaaattgaaaatattcagcgtccaattacgatggaagcaggatcaattgtgcttatggatctattatggtctgatcctacggagaatgacagtgttgaagggctgcggccaaatgctaggggtccaggattagtcacttttgggtcttactgttgcagcctgatcgagtaatggaattttgcaacaacaatgatcttcagctgattgttcgtgcacatgaatgtgtgatggatggctttgagcgttttgcccaggggcatttgatcacacttttctctgctacaaactactgtggtacggcaaataatgctggggcaatattagttttgggtagagatctcgttgtggttcctaaattgattcatccattaccgcctgcaatttcttcaccagaaacgtcaccggaacgtcatattgaggatacatggatgcaggagttgaatgctaacagaccaccaacaccaactagaggccgtcctcaagtaacaaacgaccgaggttctcttgcttggatatagttattcattattaagaatggccttattgtttatgccttgacgggttgtgctattgcctgaatttccggtgttacgtatatagcatgatgccgtttacagggtattcgagcttacccgcagaaagcttcaaggatcaagcttttatttgtcccggttctcatcactcaatcatctggcctgtagacgatacaagttcgagaagcaagcaaagttggtagccactgctaggttggttcaattgacaaaagctagaagttgcagtatgggttcctacccacctgttgtaaattgagccctagggtacaaaatcaaggtcatggatggatgtccgtgtcatggaatgtcagtgctggctatttttctcattattttttacatattttttttactcattgtccctaggttattgttttttttttttcaatttatatatttttaaatcaagaggacaagggtttttttttttttcctgtgatggtgagatatataaatcagaaatctttcttgggggtccatgtatcataggggttgtgtagttcccatccatgctctgtacaactaatttttgtgtgaatcaacatattctgacagaaatgtgaattttgagaatagaattttgtatattgccttatgctgcaaatagctttagactgttcctgaagatgtatagcagttgcaggcagtgaccgatatagaattatagttgtaggggtaatgtttatatttataaattaagtgtttcagtttttgcattatacatgactagtgcaaaagacactttgtatatatgtaattgaccaataggggatgacatcccaactatcccatttctttggttgttt

SEQ ID NO: 454 - DNA, 1491 bp, Glycine max
atggccacttccgacagaaacatgttactaaattatgttccagtttatgtgatgctcccactcggagttgtcactgttgacaatgtttttgaagacccagatggccttaaagaacagctcttgcagcttcgagccgcaggtgttgatggggttatggttgatgtgtggtgggggatcatagaactgaaggggcctaagcagtatgattggagtgcctacaggagtttgtttcagttggttcaggaatgtggcttgacactccaagctattatgtcattccatcaatgtggagggaacgtaggagatgtagttaacatcccaattccccagtgggtgcttgacattggagaatcaaatcctgatatcttctacaccaaccgctcaggattcaggaataaggaatatctaactgttggtgtggacaacgagcctatattccatggaagaacagccattgagatatacagtgactacatgaagagtttcagagaaaacatgtcagattttttagactctggacttattatagacattgaagttgggcttggcccagctggagagctcagatacccctcttatccacaaagccaaggatgggaatttcctggtattggagaatttcagtgctatgacaaatatttgaaggcagatttcaaagcagctgtagcaagggctggccatcctgaatgggaactgccagatgacgcaggcaagtacaatgatgtcccagaatctactggattcttcaaatcaaatggcacttatgtcactgaaaaagggaagttcttcttgacctggtattctaacaaattgctgaaccatggtgatcaaatactagatgaagctaacaaagccttcctgagctgtaaagtcaaattagcaatcaaagtatctggaattcactggtggtacaaagttgaaaatcatgctgctgagcttacagctggatattacaaccttaataatagagacggataccgtcccattgcaagattgctgtctcgccatcatgccattttgaactttacatgtcttgagatgagggactcagaacaaccctcagatgccaaaagtggaccacaggagcttgttcagcaggtattgagtggaggttggagagaagacatccaagttgctggagaaaatgcacttccaaggtatgatgctacagcttacaaccaaatcatactgaatgcaagaccacaaggtgtcaacaacaatggccctccaaaactaagcatgtttggagtaacataccttcgtctatcagatgatctactgcaaaaatcaaattttaatatgttcaaaaaatttgtgctaaagatgcatgcagatcaggattactgtgcaaaccctcaaaagtacaatcatgccataacaccattgaagccatctgcaccaaagattcccctggaggttcttctggaagcgactaaaccaataccgccattcccctggcttccagagacagacatgaaagttgatggttga

SEQ ID NO: 455 - DNA, 1314 bp, Glycine max
atccaatcttcactcactctctaatttactacagaaaaaaaaaaaagatgagtagtgttttttcagaacacaaattccaacttcaaccctctcaccaacttctctccctcaagaaatccctgagggacatagacatcccagtcccaccaaggaagctcctcacccgccgctccgccgccgtccacgacgtctccggcgacatgttttccgatgacaccctccggcacaagtaccttccccacaatggctccaccgactcctccgacgatgactccggcgacccctacgcctccgatcaattccgcatgtttgagttcaaggtccggcgctgtactcgcagccggagccatgactggacagactgtccatttgtacatcccggcgagaaggcccgccgtcgggaccctcgccggtttcattactctgcaacagtctgtccagagtttcgccgcggtcagtgtgaccgtggcgatgcatgtgagttttctcatggggtgtttgagtgctggttacacccttctaggtatagaaccgaggcttgcaaggatggtaggaattgcaagcgaaaagtttgcttctttgctcacacccctcgccaactcagggttttgcattccaatgaaaatagcaacaagaaaaagtgcaccaatatgagccctcataacaacaacaacaacaccaacaattgttgtttggtttgccattgctcttcttctactcgttcaccaacttcaaccttgttcggcatgtctcatttttctcctccattgtcaccaccttctccttcttccccttctaggtttgagaccaaccatcatcatggtgttgtgaaatataataaggatgtgctctctgagcttatgtgttccatggagggtttgaattttggtgaggcttcacttttgtctgctgcttctaagcctcacaacaatttgtcttcttggcttgatgtttctgaggatcacaatcaaaaacagttcagtactctttcaccaaccatcactgcttgtggaagcttttccaacaacggaaatgggagatttttgagagaagaaagtggggttgttgatgatgttatttccccagatctcgcatgggtgaatgaattactgatgtagattatatgcatttgaagatgatgatgacaaaaagtggttcgtggtgggaattgtgatgaggatttaccaagtgtaaatacatgttggagctagcaacatatattacatccttggcttcttttcttattattgttttaagaattttattgctttctgaatttgttttaagatttgtcaaattaaattctgtaatttt

SEQ ID NO: 456 - DNA, 980 bp, Glycine max
acactgaataagctagtgtcgacaaaatcatattacattttcttttttcctagaagcagaagctgggacttgaattatctacaatataatgtttcgttaattctttggaaagttctctaagacaacaccacatgccatgtctctcattcggtcccatcgctcccatctcatatcccatcttcagcaataattcaagtacccaattaatggtttcttgcaaatctttctatctatatatattcatggctgcaagcgttttagagcaacccaaatcattcacatcctaaggcattcaaaattctaaggaaacttaaaactattctcttctcaaatcaatactacaatgggttttcgcttacctggtatcagaaagtcattatttgcagcaaatcaagcatcttcaaaagcggtggatgcaccaaagggctatcttgcagtctatgttggagagaaaatgaagcggtttgtgattcctgtttcatacttgaaccaacctttattccaggacttgttgagtgaagctgaggaagagtttggctatgatcatcccatgggtggcctcacaattccttgcagtgaagataccttccaacatataacttctttcttgaactgaccataattctcatactttaggagtactgacatagcttagaggagacattttgtacaataggcgtgttctgaaaatgtatagatccccctttgtcacgagagatggaaaatcagaatatattagttttttgtttaattacaataatttcaacaactcgagctctgcttgtctttactttatgtttattagtttcaatcttgccttctctctgtatgagccaggtaggttgaattctgttaaaacacgagacttaggagaagtattttccctaggaccatagacagataaaattacttaggagaaacagaacatattcatatgtaattatacatatctaattaaaattttcatctgtgcattgccc

SEQ ID NO: 457 - DNA, 3334 bp, Glycine max
tgatgaggtccccagatccttctaaagttataacctctctcactctctcgcacgtgaccactctcttaaatctctctcccaattccaaacccaaccaaaagcccatcgctttctccttccgtcaatcctaaacccaaaaaaagccatcaaatccctccctccctccctctctctttcatttccatttcctcgtttccatcatcatcgcgcttcctttctgtctttttcccccgcaccccttacttgttattatcactgccccgtgcgtgcgtttaatggctccgcgcctcgctataaaaccccccaaacagattcattgagattcaaatgctattggacgacacgccgtatctacgctcaaatgctcggatctctcgctggtgtaaaaccgcttctctctctctctctctctctctctcgcctctctttccacgcctcttccttcttcgtcaacaccttcttcgcttttagtcttcgtgttggcggcaatttgaattccgttactgttctctcgcattcgtgatgctttctttggttacgtggcctccagcttgaagcagttggagctgcaaaagtatgtgtttcgattatttgtggttgtagagctacctttagctttgatatctctcttatgggttaaggagtgtggcgaaatggttttacattccaattttattaaaacatggaagagacacgagaagatgcagggccagcagagcgaaggccatccaacatgtcatggtggccttcagattttgttgaaaaattcgaatctgtttctttgagctctcaagatgagaccttaaataataaagaatcacctagacattctaaccgggatgttatgtcacctcagaaggcgtcacaaattctgtggcgcactggaatgctttcagaaccaatacccaacggtttttattcagtcattctggagaaaagactcaagaaactttttgatagtattcctactttggaggagcttcaagctttgggtggagagggttttagggctgatgtcattgttgtggatgcagagaaagatagaaggttatctatgttgaagcaactaattgtggcattagttagaggattgaattcaaacccacctgcgatgattaagaagatagctggtttagtttctgacttttataagcgatcaaatgtagaaagcccagcaaaagctgcacttgaggaatcatcccacatgtttgagaatcgtggcgtccagatgctggggcaaataaggcatggttcgtgccgtcctcgagccatcttatttaaagtattagcagatactgtaggtcttgaaagtagacttatgatgggttttccaaatgatggggctgctgaatgtgtagactcttacaagcatatgtcagtgatagttgtgttaaattctgtggaactgctggttgatcttatgcgttttcctggccaactattaccacgatcaaccaagtcaattcttatgacacatatttctgcagcaggagagagtgattctgcagaaaatgattcctgtgactcaccattagaaccaaatagtcctttatatggggtttcagagagtgttgaaaaggaggaaaacctccaattccatagaagatttgaagtgtcttcgaatgtatcaggccttcccttgcgaaatatgatgttacgatcaaataccagtctggacaggaattggagtttttctcatagtgaacccaacattgctactgcatttggtcggcgtagtcggagaaaggtcattgctgaacagaggactgctagttcaagtccagaacatccatcattgcgagctcatggacggtccaagcttagtggtgacaggacttcttttagagattttgctgatgaccagtctacactaagatccagctacaagtcagatggcgcttcctcatcagaagctcgtaggatacgaagaagaagtatcagcattacaccagagattggtgatgatattgctagggctgtacgggcgatgaataaaacgctaaagcaaaagcgtcttccgagagagcaggggggtgatagttcattatctcattctccaattgacagaaccagcagtttagatcttcagaaaaatgtgtcaaatttccatcttgatggtcaccatgagaggtcccccttatatttgttacaccgtgaccctgtgacgtctcaaaaggcaatgtcgttaccttcttctccgcatgattatagagtacaagcctctgagagaagcgaggcatcagaatatacaacgaatgatgaactggagtctacttggaataaaatcctcgaatcaccaatgttcagtaatcgacctctgttaccatatgaagaatggaatattgatttcacagaattgaatgttggaactcgtgttgggattgggttcttcggagaagttttccgtggcatatggaatggcacagatgttgctatcaaggttttcctagagcaagatttaactgctgaaaacatggaagatttctgcaatgagatatccattctcagccggctccgacatcctaatgttatcttatttcttggtgcatgcacaaagcccccacgcttgtcaatggtgactgaatacatggagatgggatctttgttttacttgattcatgtgagcggtcagaagaagaagcttagctggcggagaagactaaagatgttgcgagacatatgccggggcttaatgcacatacatcgtatgaagattattcaccgtgatgtgaaaagtgcaaattgtcttgtggacaagcattggatagtgaaaatatgtgattttggactttcaagaataataacagaatcccccatgagagattcctcgtcagctggaaccccagaatggatggctcctgaactaattcgaaatgaaccattctctgaaaaatgtgatatctttagcctgggagtgataatgtgggagctctgcaccttgaataggccttgggaaggcgtacccccggagagggtggtttacaccgttgctaatgagggtgctcgattggatattcctgaaggcccgctaggcaggctgatttcagagtgttgggcggaaccacatgaacggccaagttgtgaggagattctctctcgattggtggacatcgagtactcaatgtgttgatgccgtgcttttatcttttgtacatagtgaactttgggtagagttgtcactttgtgttttcggctgatgtataaactgagtttttgttccttatctgaaaacttattgtaatcatgcatcggtgcgtgttcctaagtttcatgaagggcaatgaaaagtaaatccatcactcacatcttctgtgcgatgaaaaaaataacaatt

SEQ ID NO: 458 - DNA, 1014 bp, Glycine max
atggcttccattggcaaaaagcagcacattttagctcttgtgctccttctctcaatctgcacttcccaagtaatgtcccgctacctccatgaggcatccatgtccgaaagacatgagcagtggatgaaaaaatatggaaaagtatataaggatgctgctgagaagcaaaaacgtttactgatattcaaggacaatgttgaattcattgaatccttcaatgctgccgggaacaaaccttacaagcttggcatcaatcaccttgctgaccaaacaaatgaggaatttgtggcttcccataatggatacaaacacaaggcatcacattcacaaacaccattcaagtatgaaaacgttactggtgttcctaatgcagtggattggagggaaaatggagctgtcacagcagtcaaggaccaaggccaatgtggtagctgctgggcattttcaacggttgcggcaacagaaggtatctaccaaataactacaagtatgttaatgtccctttcagagcaagagttagtggattgcgacagcgtggatcatggttgtgatggaggttacatggaaggtgggtttgagttcattataaaaaatggtggaatcagcagtgaggcaaactacccctacacagcagttgatggaacttgtgacgcaaacaaagaggcttctcctgcagctcaaataaagggatatgaaacagtgcctgctaacagtgaggatgcactgcagaaagctgttgcaaaccaacccgtgtcagttaccattgatgccggaggatccgctttccagttctactcaagtggggttttcacaggacaatgtgggactcaactagaccatggcgttacagcagttggttatggtagcactgatgatggcactcagtattggatagtgaagaattcatggggcacacaatggggtgaagaaggttacataagaatgcaacgaggcacagatgcccaagaaggcctatgtggcattgccatggatgcctcgtacccaactgcttag

SEQ ID NO: 459 - DNA, 1368 bp, Glycine max
atggatgcagatgcagctcctttgcacatagcaatgtatccatggtttgctatggggcacctcaccccatttctccaccttgccaacaagttagccaaaaggggacacaaaatctccttcttcatacccagaagaacacaagccaagttagaagacctcaatcttcacccaaacctcatcacctttgtccccatcaatgttcctcacgttgatggtcttccttatgatgcagaaaccacttcagatgttccctcctctttgttcccactcattgccactgccatggacctcacagagaaaaacattgaacttctcctccttgatctcaaaccacacatcgttttgttcgatttttccacatattggctaccaaacttggctcgtagaataggaataaagtctcttcagtactggattattagccctgcaacagtagggtacatggcatccccagctagacaaagagaagatgacatgagaaaaccaccttcagggttccctgattgttccatcaagctgcatgcacatgaagttcggttccttgctgcagcaaggaaactagagtttggcaatggtgttcttttctatgatcgtatctcagttggtgcagatttgtctgatgctattggattcaaaggttgtagagaaattgaagggccttatgtggactatctagagacacaatttggtaagcccgttttgcttacaggtcctcttgtgcccgagccatcaaattcaactttggacgcaaaatggggtgaatggcttggtagattcaaagctggttcagtgatttacattgcatttggaagtgaacactctttgcagcaaaaccaattgaatgagttgttgttgggtcttgagctaacaggaatgccattttttgcagcacttaagccccctattgagtttgagtccattgagaaagctctcccaaaagggttcaaagaaagggttcaagaaagaggggttgtgtatggggggtgggtgcagcaacagttgatcttggcacacccttctgttgggtgcttcataactcactgtggtggagcttctctaactgaggcacttgtgaaccggtgtcagttggtgctgttgccacgacttggttccgatttcatcatcaatgcaagaaccatggggggaaaattgagggttggtgtggaagttgagaaaggggaagaagatggtttgttcacaaaggaaagtgtgtgtaaagctgtgaaaactgttatggatgatgagattgatcagcttggcagagaagtcagagcaaatcacaacaaagtgaggagcctcttgctaagtaacaatttcgagacatcttgtgtagatgctttcagccacaggcttcaggatttagtctaa

SEQ ID NO: 460 - DNA, 2191 bp, Glycine max
taaaggtttccccttgaaagatcgtacataaaaagtttttgtcactttgaaggtaccaagaagctgtcaacattgataaaaacctttgtggttagtaatggaatttaagaaacctagcattcctctaagatctttatcacaattatttgcccttcctccttgtcataacaaaagtggactaggtatgtatagcactcaccttgaaggtaccaagaagctgtcaacattgataaaaacctttgtggttagtaatggaatttaagaaacctagcattcctctaaggtctttatcacaattatttgcccttcctccttgtcataacaaaagtggactaggtatgtatagcactcacatatattattacttttttgtctgagatacactacaagcctacaactctgtctattgcacaatggatgcagatgcagctcctttgcacatagcaatgtatccatggtttgctatggggcacctcaccccatttctccaccttgccaacaagttagccaaaaggggacacaaaatctccttcttcatacccagaagaacacaagccaagttagaagacctcaatcttcacccaaacctcatcacctttgtccccatcaatgttcctcacgttgatggtcttccttatgatgcagaaaccacttcagatgttccctcctctttgttcccactcattgccactgccatggacctcacagagaaaaacattgaacttctcctccttgatctcaaaccacacatcgttttgttcgatttttccacatattggctaccaaacttggctcgtagaataggaataaagtctcttcagtactggattattagccctgcaacagtagggtacatggcatccccagctagacaaagagaagatgacatgagaaaaccaccttcagggttccctgattgttccatcaagctgcatgcacatgaagttcggttccttgctgcagcaaggaaactagagtttggcaatggtgttcttttctatgatcgtatctcagttggtgcagatttgtctgatgctattggattcaaaggttgtagagaaattgaagggccttatgtggactatctagagacacaatttggtaagcccgttttgcttacaggtcctcttgtgcccgagccatcaaattcaactttggacgcaaaatggggtgaatggcttggtagattcaaagctggttcagtgatttacattgcatttggaagtgaacactctttgcagcaaaaccaattgaatgagttgttgttgggtcttgagctaacaggaatgccattttttgcagcacttaagccccctattgagtttgagtccattgagaaagctctcccaaaagggttcaaagaaagggttcaagaaagaggggttgtgtatggggggtgggtgcagcaacagttgatcttggcacacccttctgttgggtgcttcataactcactgtggtggagcttctctaactgaggcacttgtgaaccggtgtcagttggtgctgttgccacgacttggttccgatttcatcatcaatgcaagaaccatggggggaaaattgagggttggtgtggaagttgagaaaggggaagaagatggtttgttcacaaaggaaagtgtgtgtaaagctgtgaaaactgttatggatgatgagattgatcagcttggcagagaagtcagagcaaatcacaacaaagtgaggagcctcttgctaagtaacaatttcgagacatcttgtgtagatgctttcagccacaggcttcaggatttagtctaagttcagccccagtttaattaaatcactgtataagttctatattattgacactgaatccagtagggttatttggtcgtgtaagaactaaaaagcgtcctttatgattgatgcattaaatcatgggttgagaaagaatatatgtacaaaacctagtcttgataatcttaaagaaatgtttattattttgtaataatcagttaagggcatgtccaataaggttcatttaaggtgaaggttcttaattcagctttagtgctgtcaattttagaaacaagttgacagcaattttcgtcacaatatcaaggcttttgaggtgttatgatcacaaacgcgattactgttatgactgtatcggctgcatttgtttataattttcctcaatgtcaatgcgacaaaaatgtaactgcgac

SEQ ID NO: 461 - DNA, 1675 bp, Glycine max
acaataaattaaaaaattaaagtttggcccgttcctgtgtgcccctttatggattcctgtatcgtcgcaaaccctagaatccaagattcgagcttcccatgaactctgccgccgtcgcaatcaaatccatcaaactcaaccgctcccggcctgacttagacgatgtccgttgcgaggccaaaaccccatccctcctttcctaccccaacatcctcaaagcacattgttccttcacagtggatcgctgcctctgggtggtgatgtcgttcatggccgcaggatcacttcaatccatcatttatcattcccaccccaacggcttaatggagccctacatcaccgtggttctcagagacacgctcaacgcgctctcctacctccactgccagcatctccatagagacattaaagtcggtaacatcctcatttacaccaatgggcaagtgaagcttgctgatttcggtgtctccgcttccatatacgagtccaccaccaccaccaccacgtcttcttcttcgtctctgaagttcactaatgttgtcggcacgccctattggatggctcctgaggtgattcactcacacacaggttacagtttcgaggctgatatatggtcttttgggataaccgcgttggagcttgcgcatggaaggcctcctctctcgcaccttccaccttccaagttcatgatgctcaagatcaccaagaggtttcctttctccgatgatttcgatgacaaggaaaatatgataacacaattaaagaatgcacagaggcattagaactgaatcttgtgtgcgttaaagctttggtaagaagaggagaagctcatgaaaagcttgagcattttgaagaggccattgctggtgagttcaaattttataatagagtggagggtaattatacaaagtaagggaggtgtaatttctcaaataagaaatgtgtcaagtgcaatgagtactcacctaagggagcttcttgtaattatccctttattttggtcttaatgtacaattggacgactgtgtatttaccacactaatagctttctgattcttatagacttccatcttctatcattcttgccacttttttcaaaaataattggcaaatatgaaaaagatcttagaaattgatccctaaaatgatcaagctaggaaatccattcagcgactagagccccttgctgcagaaaaacgagaaaagatgaaggaggaaatgattgctcatatacctctatatttgtatcccttccttaatacaaccagtaagtccagattatttgagtatttgaggcttaccactcttggagtcattggcgccttagtgaaggtacaacctccttgcacaaacaaattcacttcttcttcccaagaaattgttgatgcctatgggtaatttactacaacctaatctagctgcttataaattcactccactctattttttaacaataaatattggtagttactttctctctaggtcatacagataaaaacagaaaatatttgatacaagagtatttgtcaaaacaaatttacaagttagttgaaaattaaacttataaattagttgaaactcataagagctgaaatgataaaaatttataagctagctagttgattggataaaaatatttaataatattagccaataagcttgttaataaatataa

SEQ ID NO: 462 - DNA, 2831 bp, Glycine max
tttggattgatatttttacactgatgtagcccaaatttattgatatctgtgccttatttttcaactctaaatatgtaagcaaagacgaaacaatttttttgtcacactttgattcagtcatgcatccttcagatcagccattttcaaacatctaattagaatattccaagtgtacacttacctctattcatagaaattgttgaataattgaatcctgcacaagaaaatttctatggatattctttcttcattgatctttgttgcaagtatacttatcccttgtttcaaattctgcatagcagctgataccattcttctgtcccaatccattagtgatggcatgaccttggtttctcgaggtgaaacatttgaacttggtttcttcagtcccgagaactccaacaaacgttatctcggaatttggtacaagaatatcccccagacagttgtttgggtttcgaacagggccatcaatgattcctcaggcatcttaacagtgaacagtacaggaaaccttgtcctcagacagcatgacaaggttgtctggtacacaacatctgagaaacaagcacagaatccagtggcgcagcttctagattcagggaatcttgttgtaagagatgagggtgaagcagactcagaaggatatttatggcaaagctttgactacccttcagatacaatacttccaggcatgaagttgggattgaacctcagaactggtattgaatggagaatgacatcttggaagaatcccaatgatccatccccaggagacttttattggggccttttgctttataattatcctgagttttatctgatgatgggaacagaaaagtttgtgagagttggaccatggaatggcctgcatttcagtggcataccagatcaaaagcctaacccgatttatgctttcaactacatatccaacaaggatgagaagtactacacttatagcctacagaatgctgctgtgatctcaagattggtaatgaatcaaacctcttcaatgagtattagatacgtatggatggaaaacgaacaatattggaaggtctataaatcgctgccaaaagacaactgtgactattatggcacatgtggagcctatgggacttgcttgattacaggctcccaaatatgccagtgcttagcagggttcagtcccaagtcaccacaagcatggaactcatctgactggactcaaggatgcacacggaatcagccattaaattgcactaacaagctcaatgatggatttatgaaagtggaaggtgtgaaagtgccagatactacacatacttggttagatgagacaataggtcttggagagtgcagaatgaagtgcttgaataattgttcttgtatggcatatactaattcagacataagaggtgaaggtagtggctgtgtcatgtggtttggtgatctaattgatattaggcagtttgaaaatgatgggcaggatctgtatattcgaatggattcttcagaattaggggaacaagaagagcacaagaaggtggtgatcataatagtttctaccaccattgctacaattttagtaattctttgtattggttgttatcgtatatacattgtgcggcacagcataactgagtattcagatattgtacgtgatcaaaataggggaggaagtgaagaaaatatcgatctccccttacttgacctttcaacaatagtcattgccactgataacttctcaataaacaacaagattggagaaggtggttttggaccagtatacaagggaagattagtaagtggacaagaaattgctgtgaagaggctctcaagaggctcgggacaaggaatgacagagttcaagaatgaagtcaaactgattgctaaacttcagcaccgaaatcttgttaagcttcttggttgttgcgttcaagaacaagacagaatgctggtttatgagtacatgactaatcgtagcttggattggttgatttttgatgatactaaaagcaaactgctagattggcctaagcgtttcaacattatctgtggaattgctcgaggtcttctttatcttcatcaagattctagattgaggataattcatagagacctcaaagcaagtaatgttttgctcgatgaccagatgatccctaaaatatcagattttggcattgctagaatatttggaggagagcagacagaaggaaatacaaatcgagttgttggaacttacggctacatggcaccagaatatgcagctgatggtattttttctgtgaaaactgacgttttcagttttggtattttgttgctggagattttaagtggaaagagaaacagaggattttatcttgaaaaccaatctgcaaaccttgtcactcatgcatggaatctgtggaaagggggcagggctatagaaatggttgactcaaacatagaggactcttgtgttctatcagaggtattgcgttgcatccatgtctgtctcttgtgtgttcagcaacacgcagaggataggcctcttatgccttccgtggttctaatgttggggagtgaaagtgaattggctgagccaaaagaacctggtttctacataaagaatgatgaaggtgaaaaaatttccatctcaggtcaaagtgatttattttcaaccaatgaaataactatcacactattagaagccagatgaaatttaaatcaaattactatattgctcatgcatgtgagtactattatgtattagcaagtgcaccaattcttcccaagtagtaaagctagaatggaagttcgagtgttgaatctacaggaactttgtttatactagatgaacattttattaa

SEQ ID NO: 463 - DNA, 2730 bp, Glycine max
aaatatttttgaagatcagtttggattgatatttttacactgatgtagcccaaatttattgatatctgtgccttatttttcaactctaaatatgtaagcaaagacgaaacaatttttttgtcacactttgattcagtcatgcatccttcagatcagccattttcaaacatctaattagaatattccaagtgtacacttacctctattcatagaaattgttgaataattgaatcctgcacaagaaaatttctatggatattctttcttcattgatctttgttgcaagtatacttatcccttgtttcaaattctgcatagcagctgataccattcttctgtcccaatccattagtgatggcatgaccttggtttctcgaggtgaaacatttgaacttggtttcttcagtcccgagaactccaacaaacgttatctcggaatttggtacaagaatatcccccagacagttgtttgggtttcgaacagggccatcaatgattcctcaggcatcttaacagtgaacagtacaggaaaccttgtcctcagacagcatgacaaggttgtctggtacacaacatctgagaaacaagcacagaatccagtggcgcagcttctagattcagggaatcttgttgtaagagatgagggtgaagcagactcagaaggatatttatggcaaagctttgactacccttcagatacaatacttccaggcatgaagttgggattgaacctcagaactggtattgaatggagaatgacatcttggaagaatcccaatgatccatccccaggagacttttattggggccttttgctttataattatcctgagttttatctgatgatgggaacagaaaagtttgtgagagttggaccatggaatggcctgcatttcagtggcataccagatcaaaagcctaacccgatttatgctttcaactacatatccaacaaggatgagaagtactacacttatagcctacagaatgctgctgtgatctcaagattggtaatgaatcaaacctcttcaatgagtattagatacgtatggatggaaaacgaacaatattggaaggtctataaatcgctgccaaaagacaactgtgactattatggcacatgtggagcctatgggacttgcttgattacaggctcccaaatatgccagtgcttagcagggttcagtcccaagtcaccacaagcatggaactcatctgactggactcaaggatgcacacggaatcagccattaaattgcactaacaagctcaatgatggatttatgaaagtggaaggtgtgaaagtgccagatactacacatacttggttagatgagacaataggtcttggagagtgcagaatgaagtgcttgaataattgttcttgtatggcatatactaattcagacataagaggtgaaggtagtggctgtgtcatgtggtttggtgatctaattgatattaggcagtttgaaaatgatgggcaggatctgtatattcgaatggattcttcagaattagagtattcagatattgtacgtgatcaaaataggggaggaagtgaagaaaatatcgatctccccttacttgacctttcaacaatagtcattgccactgataacttctcaataaacaacaagattggagaaggtggttttggaccagtatacaagggaagattagtaagtggacaagaaattgctgtgaagaggctctcaagaggctcgggacaaggaatgacagagttcaagaatgaagtcaaactgattgctaaacttcagcaccgaaatcttgttaagcttcttggttgttgcgttcaagaacaagacagaatgctggtttatgagtacatgactaatcgtagcttggattggttgatttttgatgatactaaaagcaaactgctagattggcctaagcgtttcaacattatctgtggaattgctcgaggtcttctttatcttcatcaagattctagattgaggataattcatagagacctcaaagcaagtaatgttttgctcgatgaccagatgatccctaaaatatcagattttggcattgctagaatatttggaggagagcagacagaaggaaatacaaatcgagttgttggaacttacggctacatggcaccagaatatgcagctgatggtattttttctgtgaaaactgacgttttcagttttggtattttgttgctggagattttaagtggaaagagaaacagaggattttatcttgaaaaccaatctgcaaaccttgtcactcatgcatggaatctgtggaaagggggcagggctatagaaatggttgactcaaacatagaggactcttgtgttctatcagaggtattgcgttgcatccatgtctgtctcttgtgtgttcagcaacacgcagaggataggcctcttatgccttccgtggttctaatgttggggagtgaaagtgaattggctgagccaaaagaacctggtttctacataaagaatgatgaaggtgaaaaaatttccatctcaggtcaaagtgatttattttcaaccaatgaaataactatcacactattagaagccagatgaaatttaaatcaaattactatattgctcatgcatgtgagtactattatgtattagcaagtgcaccaattcttcccaagtagtaaagctagaatggaagttcgagtgttgaatctacaggaactttgtttatactagatgaacattttattaa

SEQ ID NO: 464 - DNA, 1770 bp, Glycine max
aaaaccgaactcgacaaagatttcgtcgcatatgtctcgacctccgtgtccctatataaataaccgccacctcttcgtttatcgaaattaaaaaaagagaaaagcaactagagaaaaaaaaaaagagaagaaaaaaaaacttggttttatcttctttgttattattatattcacttcttcaatatcttggttctttgatattattattcgattgagcaaaaaatgggagttccagagagagaccctcttgcacaattgagcttgcctcctggatttagattttatcccactgatgaggagcttttggttcagtacctttgccgcaaggttgctggccatcatttctctcttccaatcattgctgaagttgatttgtacaagtttgatccatgggttcttccaggtaaggcagcgtttggagagaaggagtggtacttcttcagtccaagagacaggaagtacccgaatggttcacgaccaaacagagttgcgggttctgggtattggaaagccactggaactgacaaaatcatcaccactgaaggtagaaaagttggcataaaaaaagcacttgttttctacgttggcaaagcacccaaaggctccaaaaccaattggatcatgcacgagtatcgccttctcgactcttcccgcaaacacaacctcggaaccgcaaagcttgatgattgggttctgtgtcgtatctataagaagaactcaagtgcgcaaaaggttgaggcaaatcttttggctatggaatgtagcaatgggtcatcaccttcttcatcgtcccacgtggacgacatgctggaatcgttgccggagatcgatgatcggtgcttcaccctgccgcgagtgaactcagtcagaacaatgcagcagcaggacgagaaattcggatttcagaacatgggatccgggtttttcaccgattgggtcaacccgacggatcttgattcagtttccgaatttgggtcgggttgccaaacccaagggatggtgaattatgattgtaatgacttatttgtcccttctgtgccgcccttcggccacagccatgtaaactacatggtgggggcaccaccgtccgaggaggaggttcaaagcggtgtgaggactcaacaggccgatggggccgcatgttttcagcagaacccaaatgcccgattgttaccgggctcgggcgacccatttgggtttgggttcatcatgggtcagcaagttgagttcgggtttagggactgaaggatctgatagtgttgttctgtaaataattggggattttaatttaaattctatgctcattgttatggaaaattgcaattttggtcattcttttcggctagacacatacaatgaatcggtatgaaactgagcaaggatgacccaatggtgctttcaccacagcaccgcatgctgaaaaattaattgctttgcaagacattattgggctaaatatgaatcacgttgtacttcaaagcattacatagcaactattttccaaatttaagtttagtttagagcattagatattgatatttttatgtggttggtgtcccatgcatccttgtagacaacctgatcaacaagcaatgaaccagctgtaaaattgtctagccttgctgattgtgaaaaaagtgagatccacgtgtgaagtgaacccccgtttaatgtgttaaataaatgggtttggattgattagttgaaaaaagttttcaactataaaatcatctcgtttcactgcaaacatgtttaagaatgtagagaaaa

SEQ ID NO: 465 - DNA, 1891 bp, Glycine max
gaacgaagagtgtgacaaaaacgcatacttccattccataacgaagcgaatcaaagcaaaggtaatgaaacaaaagataaagcggcgaggaatgatgattgataagaacgagatgataccttgaaatttgcgacatcgaatttaaccaaaccctaagcatctggtcgtcgttgtcatcatccatccatttccatgccatggaagttactcctctctcttccccttctccaatccatggtctccatctccgtcacaaagaagcgagattcttggcggtggcttctaccctctactttgatggaatcccattcatattgcagttgcgtactcatagaggaacaaccacttataaacacccaattttgaggacttcacacaatgctcctcaatgtagcttgcgagcaatctccaagaagcatgaaaatgtggcgtggttatctgttagtcctaaattgcatgttcagaataaattccccagagatgtagttgtaagatctgaacttactgctgctgggtctgctggagatggctatttcctacctgagctgaaagtggaatctaaagtcaggggagtttgtttttatgttgtcactgccttttgtgccatatttctttttatgatgatgctggttgggcatccatcagtgctcctgtttgatcgctaccgaagaaagttccatcattttattgccaaagtatgggctacgctgactgtagcgccattttacaaaatcaaatttgagggattggagaatctgccacctccagatactcctgctgtgtatgtttcaaatcatcagagttttctagacatatatactcttcttactttaggaagaagctttaagttcataagcaagactgggatattcctctttccaataattgggtgggcgatgtttcttttgggcatcattcctttgaagcgcatggacagccgaagtcagctggactgccttaaacgatgcatggatcttatcaagaaaggagcctctgtttttttctttccagagggaacacgcagtaaagatggaagactaggcacattcaagaagggtgctttcagtgttgctgcaaagacaaatgcaccagtagtaccaattacccttattggaactggtcaaatcatgcctgcaggaaaggagggaatagtgaacataggttctgtgaaagtggttatacataaacctattgttggaaaggatcctgacatgttatgcaaagaggctaggaagacaatagcaagtgtgctgactcaaagctgagaaatatactataaatgagttcttttaatttcaatttcacgagactgaaagccccccctctgccatgaagtgaactgagaaggaagagaaaaaaccagaggaaaacaaagtggaggagaaaaaagcagaggaagaagaaaagaaagaagaagagaaaaaatcagaggaatcaaaagatgacaaggaatccaaggaggaacctgtgccgctagaaattgtgcaaggcacaaccttcgcaatgcatggacactttaagcacgatttctggcatcttttaagttagggactattttgcaacacttatgcaaaagataaggactattttgaatttttcattaagttagggactaatatgcaataggggtacaaagtcagggattatattgcttatttactcgttttgctatcatcaaatgacgtggcatcttttaagaggcacgtccatgtgtcatgccacgtcatcctttaatgccacgttggataatccacctgtcactaaaattgacctcactaacaacgttactttaaaatttaacggaaggactttgttgcaacacttatgcaaagataaggactattttgaatttaacattaagttagggactaatatgcaaaatgagtgcaat

SEQ ID NO: 466 - DNA, 1623 bp, Glycine max
aaaaagatcaaagttggataaattattcacctgttccgttttgatcgttacggacacagcttcaactacctcatcctccctgcacggcatgcacgatcaccataaccacaaccatagccatagccataactgcacctgaactaaaccacgctcacatggcgttatcttggccgcacgtgctgcagtttcggtctcaacctttgctcggacatgctaactgcgtgttcttctccgatctccccgaatcccgctctctagaactctcgtgcagtgattcctacactctgcttcgccggtgcaagatctccggtcattctccggcgacggtgaaaccggcggtgaaatgcctcagcagatctacggaggagaagcaatggagcgacgccgaaaccgccgtatccgactcggacgaagttgctgatgagccgaatgaccaggaacgaacttccgctccgacaaatggtcgctttgagtcgcagaggattgctaccacttcttccggcgattctctctctctcggaattcgagaaccggtttatgaagttgttgaagtgaggtctaatgggaaagtatcaactagaaaaatcaacaggagacaactgttgaagtcaagtggtcttcgtccacgggacattcgaagtgtggatccttcattgtttatgacaaattcaatgcctgcgttgctggtccgggagtatgctatacttctaaacctgggttcactacgagcaatagcaatgcaagattgtgtacttatatttgacaataatggtataggagggaaagcgtttttagagacattgctgcctcgattgaaccccaagatcaacaacggagggccatcgatgccctttgaacttgaggttgttgaagcagcattgctttcaagaatacagcgattggaacagagattgatggaattagaacctcgtgtacaagctcttcttgaggcattgccaaatcggttgactggtgacatattggagcagcttcgtattagcaaacaaactttggttgagttaggttctaaggcaggagctctcagacagatgctgcttgaccttctggaggatccccatgaaatacgccgtatatgtatcatgggaagaaactgcacacttagtaaaggaaacaatgacatggaatgttcagtgccttttgaaaagcagattgctgaggaggaggaggaggaaatagaaatgcttctggaaaattatcttcaaagatgtgaatcttgtcatggtcaagctgaaaggcttcttgattctgcaagggaaatggaagattctatagctgtcagtttgagttcacgaaggcttgaggttagcagagtagaactgcttttgcaggttggaacattctgtgtggcaataggtgcccttgtagcaggtatatttggcatgaacctgaagtcctatcttgaggaacatgtgttggcattttggctgacaacagcggggataattattggtggcattattgctttctttctaatgtattcctacctcagggctaggaaaatattttgattggaagaaacttcaaaattaggtgatgtcaggttgtgaacaatagtaagcacccaacaaatgcagtgatttacacgaccgatgatcaatcatc

SEQ ID NO: 467 - DNA, 624 bp, Glycine max
atgtctccccccatctttaaagtactcacattgatcatatctgtttttgccatcatgcaaatatcaacagctggtgacccagatattcttactgacttcatagtcccccccaacaccatacctgatggcaacttcttcaccttcactggcttccgtgtcattttttcacccaacaacactgtctcagatttcaaagtgttgaaggcaaccaaggtagaatttccagcccttgatggacaaagtgtctcatatgcaatccttgagttcccaggtggcagcatcaacccaccacacacacaccctcgttctgcagagttactcttcaccgttgagggttcccttcaagtggggtttgtggacacaaccaacaagctcttcactcaaacactacaaaccggagacctctttgtgtttccaaagggtctcgtgcacttccaacacaatgcggatcctcagaagccagcactcgctatatctgcctttggaagtgccagtgctgggactgtgtcaattcctagcactctctttaacaccaccattgatgacaatgtattggctctggccttcaagactgatgttgccaccattcaaactctgaagaaaggctttgctcctaaagcatga

SEQ ID NO: 468 - DNA, 2988 bp, Glycine max
aataacagaatattcataaaaatatatattgagaaaaacacaaaaggcaaaaaaagaagaaaagaaataaaatctagaaagagaaagacacaacaccttcaactcaacctcagagaaagtgattggatttatttatctattttaattttaatttcttttcctttttccgctttggggctgtgagtgtgtgtttttcgttgttgtgtggcctttgatattgtctccgttcccgtttcgttcttcttccgcttcttcttttcttttcttttcttttctccgagtttcaactttcaacacagaagagagagaaagatatatatatatatatatatatatatatatatatatagagagagagagagagagagagagagagagagagaaaacctagagtctattttcctttcgctggttactgttattgaaatttgcgggtttcggactttcgtcttcgaattgaagaatcgtttcgtccgagctgaggctttttaattgcgaacattgagtttgtttgtgtttcttcgttgcgcgtgctatcgaaggactcgagttcgtttgaggtgttttgattccgcgaaacgaatcgaaatgttggttcggaatttgatttcgccggaattctagctccgatctcacgaaattgctcgaatcttagggctgaagcaatggatgtcgattcctcgatggtgccggagaccgatcacgatcccgccgtacagaaccacgccgccgatgacccggcgccggacgcggcggagggagaacagctaggggagccgccgtcgtccggaggcggatctccggagcagacgcagccggcgcctgcttcggcgccgcagagtccggtggtcggaccgaggctggcgcctagttacacagtggtgaatgcaattttggagaagaaggaggacggaccggggccgaggtgcggccacacgctaacggcggtggcggcggtcggagaggaggggaccccagggtacattggtccgaggttgattttgttcggcggtgccactgctcttgaaggcaattccgcggcgacagggactccttcatctgctggaaatgctggcatacgtttagctggtgccacagctgatgtccattgttatgatgtcttgactaataaatggtctaggataactccctttggagaacctcccactcctagggctgcacatgtggcgactgctgtaggaactatggtggttattcagggtggcattggtcctgctggtttgtcagcggaggaccttcatgttcttgatctcactcagcaatggccacgctggcatagagtgtctgttcagggccctggacccgggccacgctatggacatgtaatggctttggtggggcagaggtatctaatggcaattggaggcaatgatggaaagagacctttggctgatgtatgggccctggacacagctgctaagccttatgaatggcgcaagctagagccagaaggagagggcccacctccatgcatgtatgcaactgcaagtgcacgctctgatggacttcttctgctttgtggaggcagggatgccaatagtgttccattgtcaagtgcatatggacttgctaaacatagagatggtcgttgggaatgggcaattgccccaggtgtctcaccatcaccaagatatcagcatgcagcggtatttgttaatgcaaggctccatgtgtctggtggggctcttggtggaggacggatggttgaagactcatcaagtgttgcagtattggacactgctgctggtgtttggtgtgatataaaatctgttgttacgagttcaagaactggtagatacagtgctgatgcagcaggaggagatgctgcagttgagttgactcggcgttgtaggcacgcagcagctgctgttggtgacctaatttttatttatggtggtttacgtgggggagtcttgctagatgacctacttgttgctgaagatcttgctgctgctgagacaacagctgctgcttcacatgctgctgctgctgcagctgcatctgcatctaatgtacaagcaggacgcttacctggacgatatggatttgctgatgatagaacgagggaaacgatgcctgaggcagctgctgatggttctgttgttttaggaaatccagttgcgccaccaatgaatggtgacatttatactgatatcagcactgaaaatgccatgcttcagggacctcggcgaactgctaaaggtgtggagtatctggttgaagcatcagctgcagaagctgaagctatcagtgcagcactggctgctgccaaggcacggcaggagaacggagaagttgaattgcctgacagagaccgtggggcggaggctaccccaagtgggaaacaaacatcttccttgattaagcctgactctgcaggttcaaataacattactcctgggggagttcggctgcatcacagagctgtggttgttgctgcagagactggtggagcattaggaggcatggttagacagctttcaatagatcaatttgaaaatgaaggcaggcgggttggttacgggactccagaaaatgcaactgctgccaggaaattattagatcggcagatgtctatcaatagtgtgccaaaaaaggtcattgcacacctcttaaagcctcgtggatggaaaccaccagtacgccggcagtttttcttagattgtaatgaaattgctgatctttgtgatagtgctgagcggatattttcaagtgaaccaagtgtcttgcaactaagggctccaattaaaatatttggtgatctacatggacagtttggtgatctcatgcgcctttttgatgagtatggtgcaccatcaactgctggtgacattgcgtgttaagagtaatacttcagcacaatattcaatcttgttagtaaaatatatcttcttttgtttatctcttttcccttttccatctaatccataaaatatcaaaagggctattataatactagtttttagg

SEQ ID NO: 469 - DNA, 723 bp, Glycine max
atgccaaacaagagcttggactcatttatatttgaccggacacgaactttactcctggattggccaatacgatttgagataatcgtaggcattgcgcgaggcatgttgtatcttcaccaagactccagattgagagtgattcatagagacctgaaaaccagcaacattcttctagatgaggagatgaatccaaagatatcagactttggtcttgccaaaatatttgggggaaaagaaactgaagcatgtacagggagaatagtgggaacctatggatacatggctccagagtatgccttggacggattcttttcaaccaaatccgacgttttcagctttggagtagtccttctagagattcttagtggaaaaaagaacactggattctatcagtccaagcaaatttctagccttttgggtcatgcatggaagttatggacagagaataagctactggatttaatggacccatctctttgtgaaacatgcaacgaaaatgaattcattaagtgtgcagtcattggactcttatgcgtacaagatgaaccaagtgatcgacccactatgtcaaatgttttgttcatgctcgacatagaggcagcaagcatgccaattcccacgcagccaaccttttttgtgaaaaagcatctttctagctcagcttcctcttcgagcaaaccagatataggtcagtttgagagcagttatcaagaaggtcgatag

SEQ ID NO: 470 - DNA, 900 bp, Glycine max
atggcttcttttgggaaccaactctctttctttttgctcttggtgcttgtcatctccccccaaattcaagctagagaaggcaagctctttagcttgttctcccatttcagaaccatctataatgtcagagaccctcttgacaaaacaaaagctgaatctccagcactagcaccagaaccagctctagaaccagcatcagcagcaccaacaccagaaccagaaacagcaccaacaccagcaccttcagctgaacaagaaattgggtcaacaataccatctggaccagcaccagagcctgaattttttgacagtggagaggcttatggcctctatggtagaggctcttatagccaataccctcccaccaaggagactcctaccgccaccaccacctttcaaaatgcgcttctgaatgaagacgtcaatgaggagagctacaaaactggctaccccaaatccaatttctacaacaacaacaatgaagagtacaacaacaatcacaacactagggaagagtacaggaacagttacattggtggctactccaacaacaactacaacgaaaaggaaaattactacaacaacaacaacaactacaatggcaaggaaaattactactactacaacaacaacaacaacaataacaacaacaacaactataacggcaatggctatgaggagaagagagagggaatgagtgacacaaggtccttggagaatagaaattactactatcatgtgaatagtgttaatgagaattataaccttaatgggtacgaatcagggagagggaggactactgaaaacgaaggttactatgagaagagtcagtatccaaatgagtttgacaccatggaagagtacgagaagcagcaggaagaacaaggctacaccccttga

SEQ ID NO: 471 - DNA, 906 bp, Glycine max
acatcctctcttccaacctcccataaccacaaacccacaaacatttactaagatcaatccacacactccatcatcatgcatcaagcaattccctatagatcatggcgccctctccataaccccaccacccacttctccccattgccattaattgcacattcccacaacgatgatgataaaatgaggaacattgttaacaataataataataatattcattcttcagcagggagaatggtgctcaacatggtttctgagaacgcggttatagtgattgggagaagaggctgttgcatgagccatgtggtaaagcacttgcttcttggtcttggtgttaaccctgcggtttatgaggtggaggagaaagatgaagagggtgttgccaagcagttggaagaaacagttcgtagtgatgggaacacacaacaggggaaggtgcagtttcctgcggtttttataggggggaagttgtttggaggattggataggatcatggctactcatatctatggtgagttggttcctatcctcaaaaaagctggggctttatggctatgatgtcttcatcttcccttttttttttttaatgtacaatagttatgctgaggttcaaaacctatgaactcgttcatactacttcaatctcttgtcactaggtcgactttgattttctcttataagtctttagttttgtgacattatattagattgtttttatctaatttttcaatttttatccttggtagtttgaggatgtttaatttctcttcttttttgtaattttccttaatgttggttaagaatcactttcttgagccttcaatttggctggctattttgatgacatacatgaattctgatgtactggatcttcccgttaatcacaacataatatgcaattgttct

SEQ ID NO: 472 - DNA, 1924 bp, Glycine max
tcagttgagctgaccctatatacggtctctctctatctatcttcacactactcttcttttttgttacaatttctcttcaattttacttctttagccttacaatgacttcttcagtcagacgcggactccactcttctttctgtgtgtattgcaacaacaaataatcaggtagaaccaccttcaagttctgatttttatcctttctcatattggacatacaaggacggctctaattactgttccagctagtgttttgtgatggccatggatgcaaaaggcataacttgggttggaaacatattccagaagtttgaggacatttatgtggacgtggaagacacaatgttggagtacatagggaatcagatgcagactgttggggaaagtgttaaaaagatctattcagatgtcatgcaagatttacttcctccgcctttatatgatttggatgaaacatcagcctctgagttgccaatagatcaatatattgacgctggattctctaataagtcatttcaaggttccaagaaaataactgtaaaggatgataccaaccaaacaactgaggattcaaggatcaaacatgatgttgataatgatgtaatccatgctaaatccggtgattctgatgctttgttcacatcagcttcttgcaactctgtcaaagggaatagttttatttcacatgcaagacaatacgttggtagcacagatattagatcaaacctcggtggtgatgaaaatcgacaaaataaaagcatacctgcttccaagacagtcagtgaaatcactttgtcaaaagcagatacatgcagtacatcacaatcatgtgaactctcccgggtaaatcaaaatcatgcagccactgtttcaaaggcagcttttgctgaagtaactaccattacctctgtagatgactgttgcaatgaaattgaaaatgcaagtactgaagaaatccccaatgtgctggtattggcagctgaatcagccgaagagaaagagatgcatgttagttcatattcctccagtgacctatttggagatccatatggggtcactatggtcggaacatttgagcctgacaattattcttaccccacaaccattgcatctcatccagaaacatgggatttggatgtaccaaagattggtactattattgtagagcaaggccataaaaccatacagcaagatgatgaactgaagcttgaggaaacttgtgttatggtgactagagatgaacttgaatcagttgccattgcactgggtaatctaataactagcaagaacaagaagaggcaacccttttctttgtccaagaaggctgcaaggaggcaagagtatgagaagcttgcaatattgcatgggaacaatgaaatagaaaagggtgattttgcagagaatttatgtccaactttacaggatgatcataagaaactactgcttcctgatatttctgaacctgagtgggagcttctctaagtaccaggatgattaagttgtgtagatacacaaccaaccctacagattctacatccacttcttagtccttatgaaggagattgacatgtcctattgcaacaaagattcaatgccccacaatacctattatgttaccacaattactttcctatgatatctgatgtcccattcccaaaatgccctcccccaccccctcttttgttttcagcttgaaaaaaaaataacgaaaaaaggagcctcagttgatcatttaaatgagaacctccaaatacagtagttaaagtagcttgagaccaattatatatggagcactaaatgcggcatattttattttctctgttgacattgcccttttgtttgattcctaagttcagatacagcatttctgtatctacttttagaggacttcaaatgctttatcattaatgataaatatcttaga

SEQ ID NO: 473 - DNA, 2855 bp, Glycine max
gttacatgatctccagcttgaagcagttggagttactgaaatatatatttcaatgattttgtattttaagaaaaacctttagcctggatatgtctcttatgggtttataattgtggcgaaatggtttttcattccaaatatataagaacatggaggagacacgagaagatgcagggccggcagagcaagggccatctaatgtgtcgtggtggccttcagattttgttgaaaaatttggatctgtttctttgggttctcaggatgagatcttaagtaataaggagtctcctcgacattttgacaaagatgttttgtcttctcagaaagcatcacaaacactctggcgcattggagtgctttcagaaccaataccaaatggtttctattcagtcattccggagacaagactcaaggaactttttgatagtattcctaccttggacgagcttcatgctctgggtggagagggttttaaggctgatatcattcttgtggattcagagaaagataaaaagctatccatgttaaagaaattaattatggcattagttagaggattaaactctaatccagctgccataattaagaagatagctggattagtttctgatttttataagtgtcccaatgtggaaagtccagcaaaagctgcactagatgaaagctctcacatgtttgagaatcgaggagtccagatgctggggcaaataaagcatggttcttgccgtcctcgagctatcttatttaaagtattagctgatactgttggtcttgaaagtaggctcatggtgggcttgccaaatgatggagctattgaatgtcaagactcatacaagcatatgtctgtgatcgttgtattaaattccgtggaaatgctggttgatcttatgcgatttccaggccaattgttaccacgatcaaccaaggcagtttttatgactcacatttctgcaggagagagtgattcagcagaaaatgattcttgtgattcaccattagaacctaacagtcctttatttggggtttcagagagtgctgagaaggaggaaaacctccaattccatagaagatttgaagcatcttcaaatgtatcaggcctttccttgagaaatgtgatgttaagatcaaatagcagtttgagtttgtcacatagtgaacccaacattgccactgcatttggtcggcgtagtcggagaaaggtcattgctgaacagaggacagctagttcaagtccagaacatccatcatttcgagcacgtgggcggtccatgcttagtggtgataggacaacgtttagagattttgccgatgatcaggctacatcaagatccagctataggtcagacaacacatcctcgtcagaagctcgtcggatacgaagaagaagcatcagcattacaccagagattggagatgatatcgtaagggctgtaagggcaatgaatgaaactctgaagcaaaatcgtcttttgagagaacgaggggatgataactcattccccaattctccaaacaatagtagtagtgatgcaaatcttcagaaaaatcgtgaccaaggagcttcacaaaaggcaatgtcattaccatcttcaccacacgattatggaggccaggcttctaagagaagtggatcatcaagatacggagtgaatgatgaaatggagtcaacatggaataaagtactggaatctccaatgttcaataataaacctctgttaccatatgaaaaatggaatattgacttctccgaattgactgttggaactcgcgtagggattggtttctttggagaagttttccgtggcatatggaatggcacagatgttgcaatcaaggtttttctagagcaagatttaactgctgaaaatatggaagatttttgcaacgagatatctattctgagccggctccgacatcctaatgttatcttgtttcttggtgcttgcacaaagcctccacgcttgtcaatggtcacagaatatatggagttgggatcattgtattacttgatacatttgaacggtcaaaagaaaaagcttaattggcggagaagactaaggatgttgcgtgacatatgcaagggtttgatgtgcatacacagaatgaaggttgttcaccgtgatctgaaaagtgcaaattgtctagtgaataagcattggactgtcaaaatatgtgattttgggctttcaagaataatgacagagtctcccatgagagattcttcatcagctggaacgccagaatggatggctcctgagcttattcgaaatgaaccgttcacagaaaaatgtgatatcttcagccttggggtgataatgtgggaactctgtaccttgaacagaccatgggaaggagtaccacctgagagggtggtttattctgttgcgaatgagggttccagattggagataccagaaggccctctaggcaggctgatttcagagtgttgggcagaatgtcatgaacggccaagttgtgaggagattctttctcgtttggtggacatcgagtactccttgtgctgaagcaatatcttttgtacatagaaaactttgggtagagttgttacattgtattatcggctgatgttgtggactatttgtgaattttgttctttttcgcagaacatgcgaaatatgaatcgatatcttatccctgtgctgcagctcgtctctttctggggcaatgaaaaagatgagatcaatccgtctctcaacataattttctgtccaatgaaaagaacagtgttccgagtgtagaatcgctttcctgatccaaattgttgataatcttgcatttttacgtaaatttgagaagtgaatctttgataattgatttgatttgaattcaaagtg

SEQ ID NO: 474 - DNA, 2228 bp, Glycine max
ataaacagagagaagagaaggattttcacctcagcaacaaagcaataaacacaagcgtacaaaatagtttattctaaaaaacaattcctttctttctttgtcttctttatgtgatggtctagtgcaagacacgaaattgcttctgcttctatattctctctgctggctgctttgcaggtcttattcactagctttccaacggaagaaagtgagttgattcctggggtcgagtcatttttccaagaagctaattccatgatgctcaaagatctaatggaagaaaagcagttaaatttgaatcagccacttttatcagtgaggaggttctcatcaacattggcctctgaaacagaccacaaaagcaaaagtcagaactcattagccagacttccacttcctcctgcttacaaatcagagttaaattcagttccagagaggaatgctggaaatgttccttttgtatgggagaaggcaccaggaagaccaaaagatgaaagcaaattacagacacaagattttgagaagcctcccttcacttcaaactttccacctgggagggtatcaaaaactaagcaacaatcacttgctgagatgagaactggaagcacactttccaactctcaaagtgttgcatccttggacaaaaaagcaacaaaaaattcaaaaggggaaactagggagaaggaaagttctgggtcagatgatggagatgaggcctatgaagatgctcgtgactcactttctaggactgaatcattcttcatgagctgtagtgtgagtggcttgagtggatgggatgaacaagaggtccaaccatttggaagtttctcaagtgatcaccaacaaggtcgcaatttcatgattgataggttcttgcttgcagcaaaggcaatgacatcagaaactcctcaatatgcttccaagaaagcacatattggacaagaacaacaaaagcagaaaaagaaagaagtgaatacagaaagtccatgtcccattaaccagcataggccaaaagctttgccacattacactcaagatattgatggggaagaaagtgatgattgcagtgaatatgaaaactacacaactacaacttgtggcctatttcctcggttctgccttttgaatccaatgcctggattaagaatggtggatagggttccaagaaatgcagctcatggaatgcaagctaaatcagctgcttctcacattggatcttcaaaagagcaaggtagaactccttatgggaaaaagttaagggattcccagtctggatttacagaagaaaaagagattttggatattcttgtaaaatctaagcatggcattgacccatatcaaagaggttgcactcaacatgattcaagttatgaaagccatgtacatgagaaaactctatatgttgattctgtacacaaggttaagtctcaaaccaataacatagggggtgattttgagacttcaataagagatagtggcatttataacaattcttcaatagattcaagtcctaaagtgattaaatctaagaagataaattcagaaagtcaagtatatggcagggacaaaaattctgatatcctaactcagaattcagaacttgatttgaagagacaactagctgccaaatgggttgatgaagaatgcactttggctagctcaaaggtgagatataatgggaagattgacttagaaagccaatgtcttacaaagttaggccatcaagaaatatctggtgcaagctgttttggacttcctcttgcccttcctgcactaaaagctccatcagagtcttggcttaagcgcactttacctaccatttgcaaaagaaacatgacttcacagtccaaccttactgcaaacactaaaactcccaagacaacaccattgcatcctaagtgggaaacaaattgttaaatcttctaatgcatatcatggacatctgcagctccctgaggatctacaaacacctcccatttcagaagcttgagctttatggagagaagggcctttgataattgacatgtatacaacaattttgatgtaatttttgcatcagtattatgtgtttctatccttctgcatggctggttcccttgtgcttctatatggcagagctgtatataactggcactgtaaatcactattgccttttgcatcttgtgaatataaatatgtcgtttcaataaaaagttgcatctgtaatttgcatcaatttttaatgcaat

SEQ ID NO: 475 - DNA, 1576 bp, Glycine max
gaaagaaaaaaaaaaagaaaacaaaaacatttccctgctacttcatcttcttcttcttcttcttcatcaccggtggttctgttcattcttccttgcaccttcttctttgaagatcgaaattgtgtttttgaaaaaatgggagttccagagaaagaccctctttcccaattgagtttgcctcctggttttcggttttaccccaccgacgaggagctcctcgttcagtatctatgccgcaaggtcgctggccaccatttctctcttccaatcattgctgaaattgatttgtacaagttcgacccatgggttcttccaagtaaggcgattttcggtgagaaagagtggtactttttcagccctagagacaggaaataccctaacgggtcccgacccaacagagtagccgggtcgggttattggaaagccaccggaaccgacaagatcatcaccaccgaaggtagaaaagttggcataaaaaaagccctcgttttctacattggcaaagcccccaaaggcaccaaaaccaattggatcatgcacgagtatcgcctcctcgactcttcccgaaaaaacaccggcaccaagcttgatgactgggttctgtgtcgtatctacaagaagaactcgagtgcacagaaggcggtgcaaaacggcgtcgttccgagcaacgagcacactcaatacagcaacggttcctcttcctcttcttcgtcacaactcgacgacgttctggaatcgctgccagcgattgatgaacggtgtttcccgatgccacgtgtcaacacgctgcagcaacagcagcacgaggagaaggtcaatgttcagaacttgggtgaaggggggttactggattggaccaacccttcggttctgaattcggtcgttgatttcgtatcggggaataataatcataatcaattggtgcaggaccagacgcaaggcatggtgaactacaacgcgtgcaatgacctctatgtccctacgttatgccatgtgggcacgtcagttccgcaaaagatggaggaagaggtgcaaagcggcgtgagaaaccaacgggtccagaacaattcctggtttcttcagaatgatttcacacaggggtttcagaattcggttgacacgtctgggtttaagtacccggttcaaccggtggggttcgggttcaggaattgaaccctgttatcgattaataatagtagtaatcttttaaatcggtaaataggtgggggattctttgggcttaactcgtgggggttttagattaatcctttagaaaagggaagaagaagaagaagaagaaggtgaaaattttggtcctcattttcagctaaagatgtagggtatacaaacgttcaatgaaccaatccacgagataaagcaatgacgggaccattttaatttgttacgacgtagttttcggcccacacaagcccttactcagccacatgaatcacatttgtacttcaaatgaacagcaagaattttttttactatatgttaggtttcgttaaataattccaatcttgatattactttgttaaccaactaaagtacctaaagaaatgcaactcattag

SEQ ID NO: 476 - DNA, 1791 bp, Glycine max
agcaactatactcttatctatcattcgatcctcttgtaatcaccttcgagtgagtgtagtaatgacgagttctcgagagcgtttggtgaaggcggtgaagcagttcgtggaggttcggtacaaggttttcagcaaccgttatggccaaaacatcatcgacatcctcgacttcccgattaaggttgtcttgtctcctttcactctcgccttcgacattgccggctctgctcctcgcggcttcggcgtccccgaactcatctccaagctctccgctacctccgtcttcgctatagctgctctgggaacttatgacattgcatttgagctggggaggaaggtgatatgtcaaaggaattgtaactcatgtaatggatggcgggccttacgctgtacaatgtgtcgaggaagcgggagggtgcattatcaagttaagaattgcaacttgaagagtggagaaaaagcgactgctgaatctgtagcagatgccattgccaacaaccgggctgagttggtgcatataccatcgtccttggattttcagaaaccattaccttcaaaagagtgtccaacttgtgatggaacgggtgtaatgagttgtcctgaatgcaaacacagattgctacatgttaggatctcagcagatgatattatggagcccccatggcaagcttataatgtcttgaaaaagattgattatccatatgagcacatattgcacagcatgaaagatcccagtattgctgcattttggctgattacatttcctcagattatgggtggatttacctatgacgatgatgtgaagcagaaaatatggtggcagtacaaggaaaatatgcggtatgatcaactccgagatgtggtggccaagagaaaaccagggtgggagtatctgcaggatgccttgatatctattgatcctgcccgtgcaagggatgatcctgtcatagtgaaaaatgtcccttactataaggctaagaaggcactggagacagaggttatgaagattgatcctccaccaagaccgccaaattggggagctagaccttccattgaatgcatcatcttggagtgaggaggatctccaagatccagataagttctatgaaatgactgttcttcttaatgcccaaagagaaatctctgataagatcttggatgcacagtgggaaactaaatggcgtcaggacaagttgaatgagatgttggaggcaaaagtgaagccgtacatccaggatatagacaacgcagttcttcctgagcctattttattaaagccacaaaatcaggaaaagagacaacggcggaggtggttcttcttttgacaacatggataaagttactatatgcttgaacatgcttgtttgtagtcctaattttttgttataaatctgtaactatttattcactgttggatccccccacaagcacacatgttgtgcctctgttgtggccatcatttttgtggaggaaacaattgtttgtgacacaaaaaatacagcttatgaaaaggaaaatctagagaaacatagtagaacaagcaacacaagtcttcttcacacggccaaacctttgctgatgttacatttggtattatgtcaaatacattccgaagataccctatttagattattcctttttaattccgtgttgctgaaattccctgaaaatcaatccgtatgtgttaactacaaactcctattctgatcaatgaacaatcttcattcttcactgtgatgaataggtgaacgttaaaataatcaagttgctggtttgctttgacatgcatgt

SEQ ID NO: 477 - DNA, 654 bp, Glycine max
gtgaacagcctctggtcgatggaacaatgtaggcaagggaagtcggcaaaatggatccgtaacctcgggaaaaggattggctctgagggctgggcacggggtcccagtcccgaacccgtcggctgtcggtggactgctcgagctgctccgcggcgagagcgggtcgtcgcgtgccggtcgggggacggattgggaacgggccttcggggcctcttccccgggcgtcgaacagtcaactcagaactggtacggacaaggggaatccgactgtttaattaaaacaagcattgcgatggtccctgcggatgtgacgcaatgtgatttctgcccagtgctctgaatgtcaaagtgaagaaatcaaccaagcgcgggtaaacggcgggagtaactatgactctcttaaggtagccaaatgcctcgtcatctaattagtgacgcgcatgaatggattaacgagattcccactgtcctgtctactatccagcgaaaccacagccaagggaacgggcttggcggaatcagcgggaaagaagaccctgttgagcttgactctagtccgactttgtgaaatgactgagaggtgtaggataagtgggagctggaaacagcgaaagtgaaataccactacttttacgttattttacttattccgtg

SEQ ID NO: 478 - DNA, 1165 bp, Glycine max
agggcacgcctgcctgggtgtcacacatcgtttccccaacgcaaacatgtaacaatgttgctgcgcggggtgtatgctgacctcccgcgagcacccgcctcgtggttggttgaaatctgggttcatggccgacttcgccgtgataaaatggtggatgagccacgctcgagaccaatcacgtgcgagccggtcagttctggacccatcgacgaccctttgcgtgcacgcacgctcccaacgagacctcaggtcaggcggggctacccgctgagtttaagcatatcaataagcggaggaaaagaaactaacaaggattcccttagtaacggcgagcgaaccgggaaaagcccaccatgaaaatcggtcgccctcggcgtccgaattgtagtctggagaagcgtcctcagtggcggaccgggcccaagtcccctggaagggggcgccagagagggtgagagccccgtcgtgcccggaccctgtcgcaccacgaggcgctgtcggcgagtcgggttgtttgggaatgcagccccaatcgggcggtaaattccgtccaaggctaaatactggcgagagaccgatagcgaacaagtaccgcgagggaaagatgaaaaggactttgaaagagagtcaaagagtgcttgaaattgtcgggagggaagcggatgggggccggcgatgtgtcccggtcggatgtggaacggtgagagccggtccgccgatcgactcgggacattgaccgacgcggattgcgatggtggcccaagcccgggctgttgatatgctcgtggagacgtcatcatcgcgattgtggatggcagcgcgcgcccttggcgtgcctcggcacctgcgcgctcctggcgtcggcctgtgggctccccattcggcccgtcttgaaacacggaccaaggagtctgacatgtgtgcgagtcaacgggcgagtaaacccgtaaggcgcaaggaagctgattggtgggatccccctgtgggttgcaccgccgaccgaccctgatcttctgtgaagggttcgagtgagagcatacctgtcgggacccgaaagatggtgaactatgcctgagcggggcgaagccagaggaaactctggtggaggcccgcagcgatactgacgtgcaaatcgttcgtctgacttggtataggggcgaagact

SEQ ID NO: 479 - DNA, 970 bp, Glycine max
acgaatcaaagcgacaagggctgaatctcagtggatcgtggcagcaaggccactctgccacttacaataccccgtcgcgtatttaagtcgtctgcaaaggattctacccgccgctcgatgggaattgcgcttcaaggcgtctcgtagggctaatccgcctcacgagggtcaccaacggcacgtgcctttggggggccgaggccccctactgctggtcggcaaacggacggcgggcgcacgcgtcgcttctagcccggattctgacttagaggcgttcagtcataatccaacgcacggtagcttcgcgccactggcttttcaaccaagcgcgatgaccaattgtgcgaatcaacggttcctctcgtactaggttgaattactattgcgacactgtcatcagtagggtaaaactaacctgtctcacgacggtctaaacccagctcacgttccctattggtgggtgaacaatccaacacttggtgaattctgcttcacaatgataggaagagccgacatcgaaggatcaaaaagcaacgtcgctatgaacgcttggctgccacaagccagttatccctgtggtaacttttctgacacctctagcttcaaattccgaaggactaaaggatcgataggccacgctttcacggttcgtattcgtactggaaatcagaatcaaacgagcttttacccttttgttccacacgagatttctgttctcgttgagctcatcttaggacacctgcgttatcttttaacagatgtgccgccccagccaaactccccacctgacaatgtcttccgcccggatcgaccggccgaagccgaccttgggtccaaaaagaggggcagtgccccgcttccgattcacggaataagtaaaataacgttaaaagtagtggtatttcactttcgctgtttccagctcccacttatcctacacctctcaagtcatttcacaaagtcggactag

SEQ ID NO: 480 - DNA, 1509 bp, Glycine max
atgaccaattgtggtaaaactaacctgtctcacgacggtctaaacccagctcacgttccctattggtgggtgaacaatccaacacttggtgaattctgcttcacaatgataggaagagccgacatcgaaggatcaaaaagcaacgtcgctatgaacgcttggctgccacaagccagttatccctgtggtaacttttctgacacctctagcttcaaattccgaaggactaaaggatcgataggccacgctttcacggttcgtattcgtactggaaatcagaatcaaacgagcttttacccttttgttccacacgagatttctgttctcgttgagctcatcttaggacacctgcgttatcttttaacagatgtgccgccccagccaaactccccacctgacaatgtcttccgcccggatcgaccggccgaagccgaccttggcccgggcttgggccaccatcgcaatccgcgtcggtcaatgtcccgagtcgatcggcggaccggctctcaccgttccacatccgaccgggacacatcgccggcccccatccgcttccctcccgacaatttcaagcactctttgactctcttttcaaagtccttttcatctttccctcgcggtacttgttcgctatcggtctctcgccagtatttagccttggacggaatttaccgcccgattggggctgcattcccaaacaacccgactcgccgacagcgcctcgtggtgcgacagggtccgggcacgacggggctctcaccctctctggcgcccccttccaggggacttgggcccggtccgccactgaggacgcttctccagactacaattcggacgccgagggcgaccgattttcatggtgggcttttcccggttcgctcgccgttactaagggaatccttgttagtttcttttcctccgcttattgatatgcttaaactcagcaggcgtgccctcggcctaatggcttcgggcgcaacttgcgttcaaagactcgatggttcacgggattctgcaattcacaccaagtatcgcatttcgctacgttcttcatcgatgcaagagccgagatatccgttgccgagagtcattttgttcgtctttcataaatccaagaatttcacctctgactatgaaatacgaatgcccccgactgtccctgttaatcattactccgatcccgaaggccaacacaataggatcagaatcctgtggtgttatcccatgctaatgtatacagagcgtaggcttgctttgactggaattaccgcggctgctggcaccagacttgccctccaatggatcctcgttaagggatttagattgtactcattccaattaccagactcaatgagcccgggcagaaatttgaatgatgcgtcgccggcacaaaggccgtgcgatccgacgagttatcatgaatcatcaaagcaacaggcagagcctgtgttgaccttttatctaataaatgcatcccttccagaagtcggggtttgttgcacgtattag

SEQ ID NO: 481 - DNA, 2691 bp, Glycine max
atgaaaaggatgcatgtcacacgttgcatgcgcaagcatggagccgtgcaacaaaaacatcccgattaccactcatgcaccctcacgttcgcaagacttgacaccactaaacgaaccacaccccacaataccaaaggcatgcaggcaaatggaaacatcgagtggcgcctcatccgcatcgctaggcacgaaattgagttttgttggggtcaccaacggcacgtgcctttggggggccgaggccccctactgctggtcggcaaacggacggcgggcgcacgcgtcgcttctagcccggattctgacttagaggcgttcagtcataatccaacgcacggtagcttcgcgccactggcttttcaaccaagcgcgatgaccaattgtgcgaatcaacggttcctctcgttgaattactattgcgacactgtcatcactcacgttccctattggtgggtgaacaatccaacacttggtgaattctgcttcacaatgataggaagagccgacatcgaaggatcaaaaagcaacgtcgctatgaacgcttggctgccacaagccagttatccctgtggtaacttttctgacacctctagcttcaaattccgaaggactaaaggatcgataggccacgctttcacggttcgtattcgtactggaaatcagaatcaaacgagcttttacccttttgttccacacgagatttctgttctcgttgagctcatcttaggacacctgcgttatcttttaacagatgtgccgccccagccaaactccccacctgacaatgtcttccgcccggatcgaccggccgaagccgaccttgggtccaaaaagaggggcagtgccccgcttccgattcacggaataagtaaaataacctcgagcagtccaccgacagccgacgggttcgggactgggacccccgtgcccagccctcagagccaatccttttcccgaggttacggatccattttgccgacttcccttgcctacattgttccatcgaccagaggctgttcaccttggagacctgatgcggttatgagtacgaccgggcgtgggaggcactcggtcctccggattttcaagggccgccgggggcgcaccggacaccacgcgacttctcatttgaatatttgctactaccaccaagatctgcaccgacgaccgctccgcccgggctcgcgccctgggttttgcagcgaccgccgcgccctcctactcatcggggcttggtccttgccccgacggccggtatcgctgcgggcctccaccagagtttcctctggcttcgccccgctcaggcatagttcaccatctttcgggtcccgacaggtatgctctcactcgaacccttcacagaagatcagggtcggtcggcggtgcaacccacagggggatcccaccaatcagcttccttgcgccttacgggttactcgcccgttgactcgcacacatgtcagactccttggtccgtgtttcaagacgggccgaatggggagcccacaggccgacgccaggagcgcgcagcatatcaacagcccgggcttgggccaccatcgcaatccgcgtcggtcaatgtcccgagtcgatcggcggaccggctctcaccgttccacatccgaccgggacacatcgccggcccccatccgcttccctcccgacaatttcaagcactctttgactctcttttcaaagtccttttcatctttccctcgcggtacttgttcgctatcggtctctcgccagtatttagccttggacggaatttaccgcccgattggggctgcattcccaaacaacccgactcgccgacagcgcctcgtggtgcgacagggtccgggcacgacggggctctcaccctctctggcgcccccttccaggggacttgggcccggtccgccactgaggacgcttctccagactacaattcggacgccgagggcgaccgattttcatggtgggcttttcccggttcgctcgccgttactaagggaatccttactcgatggttcacgggattctgcaattcacaccaagtatcgcatttcgctacgttcttcatcgatgcaagagccgagatatccgttgccgagagtcattgttcagtggacttctcacaacgtcgcgggcagcgaaccgctcacgtcgccgcaatccgaacacttcaccggaccattcaatcgacaaatcgctccaccaactaagaacggccatgcaccaccacccatagaatcaagaaagagctctcagtctgtcaatccttactatgtctggacctgcggagtcctaaaagcaacatccgctgatccctggtcggcatcgtttatggttgagactaggacgttgttcgtctttcataaatccaagaatttcacctctgactatgaaatacgaatgcccccgactgtccctgttaatcattactccgatcccgaaggccaacacaataggatcagaatcctgtggtgttatcccatgctaatgtatacagagcgtaggcttgctttgagcactctaatttcttcaaaaagggacgagccgaccggtgcacaccggaggcggaccgatcgacccaacccaaggtccaactacgagctttttaactgcaacaacttaaatatacgctattggagctggaattaccgcggctgctggcaccagacttgccctccaatggatcctcgttaa

SEQ ID NO: 482 - DNA, 1051 bp, Glycine max
atgataggaagagccgacatcgaaggatcaaaaagcaacgtcgctatgaacgcttggctgccacaagccagttatccctgtggtaacttttctgacacctctagcttcaaattccgaaggactaaaggatcgataggccacgctttcacggttcgtattcgtactggaaatcagaatcaaacgagcttttacccttttgttccacacgagatttctgttctcgttgagctcatcttaggacacctgcgttatcttttaacagatgtgccgccccagccaaactccccacctgacaatgtcttccgcccggatcgaccggccgaagccgaccttggttctgagttgactgttcgacgcccggggaagaggccccgaagggcccgttcccaatccgtcccccgaccggcacgcgacgacccgctctcgccgcggaagcagctcgagcagtccaccgacagccgacgggttcgggactgggacccccgtgcccagccctcagagccaatccttttcccgaggttacggatccattttgccgacttcccttgcctacattgttccatcgaccagaggctgttcaccttggagacctgatgcggttatgagtacgaccgggcgtgggaggcactcggtcctccggattttcaagggccgccgggggcgcaccggacaccacgcgacgtgcggtgctcttccagccgctggaccctacctccggctgagccgtttccagggtgggcaggctgttaaacagaaaagataactctttccggggcccccgccgacgtctccggactccctaacgttgccgtcagccgccacgtcccggttcaggaattttaacccgattccctttcggagtacgcgcacagagcgctatcagacgggcttcccccgtcccttaggatcgactaacccatgtgcaagtgccgttcacatggaacctttcccctcttcggccttcaaagttctcatttgaatatttgctactaccaccaagatctgcaccgacgaccgctccgcccgggctcgcgccctgggttttgcagcg

SEQ ID NO: 483 - DNA, 216 bp, Glycine max
atggtaggacggtgcggctgctctgttgagccgcgccatggaatcgagagctccaagtgggccatttttggtaagcagaactggcgatgcgggatgaaccggaagctgggttacggtgcccaactgcgcgctaacctagaccccacaaagggtgttggtcgattaagacagcaggacggtggtcatggaagtcgaaatccgctaaggagtgtgtaa

SEQ ID NO: 484 - DNA, 477 bp, Glycine max
atggaacaatgtaggcaagggaagtcggcaaaatggatccgtaacctcgggaaaaggattggctctgagggctgggcacgggggtcccagtcccgaacccgtcggctgtcggtggactgctcgagctgcttccgcggcgagagcgggtcgtcgcgtgccggtcgggggacggattgggaacgggcccttcggggcctcttccccgggcgtcgaagagtcaactcagaactgtgctctgaatgtcaaagtgaagaaattcaaccaagcgcggatgagctcaacgagaacagaaatctcgtgtggaacaaaagggtaaaagctcgtttgattctgatttccagtacgaatacgaaccgtgaaagcgtggcctatcgatcctttagtccttcggaatttgaagctagaggtgtcagaaaagttaccacagggataactggcttgtggcagccaagcgttcatagcgacgttgctttttga

SEQ ID NO: 485 - DNA, 1084 bp, Glycine max
ggaagcccgtctgatagcgctctgtgcgcgtactccgaaagggaatcgggttaaaattcctgaaccgggacgtggcggctgacggcaacgttagggagtccggagacgtcggcgggggccccggaaagagttatcttttctgtttaacagcctgcccaccctggaaacggctcagccggaggtagggtccagcggctggaagagcaccgcacgtcgcgtggtgtccggtgcgcccccggcggcccttgaaaatccggaggaccgagtgcctcccacgcccggtcgtactcataaccgcatcaggtctccaaggtgaacagcctctggtcgatggaacaatgtaggcaagggaagtcggcaaaatggatccgtaacctcgggaaaaggattggctctgagggctgggcacgggggtcccagtcccgaaccgtcggctgtcggtggactgctcgagctgcttccgcggcgagagcgggtcgtcgcgtgccggtcgggggacggattgggaacgggcccttcggggcctcttccccgggcgtcgaacagtcaactcagaactggtacggacaaggggaatccgactgtttaattaaaacaaagcattgcgatggtccctgcggatgttgacgcaatgtgatttctgcccagtgctctgaatgtcaaaccgcgccatggaatcgagagctccaagtgggccatttttggtaagcagaactggcgatgcgggatgaaccggaagctgggttacggtgcccaactgcgcgctaacctagaccccacaaagggtgttggtcgattaagacagcaggacggtggtcatggaagtcgaaatccgctaaggatcccgaacccgtcggctgtcggtggactgctcgagctgcttccgcggcgagagcgggtcgtcgcgtgccggtcgggggacggattgggaacgggcccttcggggcctcttccccgggcgtcgaacagtcaactcagaactggtcggcttcggccggtcgatccgggcggaagacattgtcaggtggggagtttggctggggcggcacatctgttaaaagataacgcaggtgtcctaagatga

SEQ ID NO: 486 - DNA, 784 bp, Glycine max
ccgacgtctccggactccctaacgttgccgtcagccgccacgtcccggttcaggaattttaacccgattccctttcggagtacgcgcacagagcgctatcagacgggcttcccccgtcccttaggatcgactaacccatgtgcaagtgccgttcacatggaacctttcccctcttcggccttcaaagttctcatttgaatatttgctactaccaccaagatctgcaccgacgaccgctccgcccgggctcgcgccctgggttttgcagtgaccgccgcgccctcctactcatcggggcttggtccttgccccgacggccgggtataggtcgcgcgctttagcgccatccattttcggggctagttgattcggcaggtgagttgttacacactccttagcggatttcgacttccatgaccaccgtcctgctgtcttaatcgaccaacaccctttgtggggtctaggttagcgcgcagttgggcaccgtaacccagcttccggttcatcccgcatcgccagttctgcttaccaaaaatggcccacttggagctctcgattccatggcgcggctcaacagagcagccgcaccgtcctacctatttaaagttgagaataggtcgagggcgttgcgcccccgatgcctctaatcattggctttacccgatagaactcgcccgcgggctccagctatcctgagggaaacttcggagggaaccagctactagacggttcgattagtctttcgcccctatacccaagtcagacgaacgatttgcacgtcagt

SEQ ID NO: 487 - DNA, 297 bp, Glycine max
atggaacaatgtaggcaagggaagtcggcaaaatggatccgtaacctcgggaaaaggattggctctgagggctgggcacgggggtcccagtcccgaacccgtcggctgtcggtggactgctcgagctgcttccgcggcgagagcgggtcgtcgcgtgccggtcgggggacggattgggaacgggcccttcggggcctcttccccgggcgtcgaacagtcaactcagaactggtacggacaagggaatccgactgtttaattaaaacaaagcattgcgatggtccctgcggatgttga

SEQ ID NO: 488 - DNA, 1644 bp, Glycine max
atgtgcaagtgccgttcacatggaacctttcccctcttcggccttcaaagttctcatttgaatatttgctactaccaccaagatctgcaccgacgaccgctccgcccgggctcgcgccctggcgcgcagttgggcaccgtaacccagcttccggttcatcccgcatcgccagttctgcttaccaaaaatggcccacttggagctctcgattccatggcgcggctcaacagagcagccgcaccgtcctacctatttaaatctttcgcccctatacccaagtcagacgaacgatttgcacgtcagtatcgctgcgggcctccaccagagtttcctctggcttcgccccgctcaggcatagttcaccatctttcgggtcccgacaggtatgctctcactcgaacccttcacagaagatcagggtcggtcggcggtgcaacccacagggggatcccaccaatcagcttccttgcgccttacgggtttactcgcccgttgactcgcacacatgtcagactccttggtccgtgtttcaagacgggccgaatggggagcccacaggccgacgccaggagcgcgcagcatatcaacagcccgggcttgggccaccatcgcaatccgcgtcggtcaatgtcccgagtcgatcggcggaccggctctcaccgttccacatccgaccgggacacatcgccggcccccatccgcttccctcccgacaatttcaagcactctttgactctcttttcaaagtccttttcatctttccctcgcggtacttgttcgctatcggtctctcgccagtatttagccttggacggaatttaccgcccgattggggctgcattcccaaacaacccgactcgccgacagcgcctcgtggtgcgacagggtccgggcacgacggggctctcaccctctctggcgcccccttccaggggacttgggcccggtccgccactgaggacgcttctccagactacaattcggacgccgagggcgaccgattttcatggtgggcttttcccggttcgctcgccgttactaagggaatccttgttagtttcttttcctccgcttattgatatgcttaaactcagcgggcgtgccctcggcctaatggcttcgggcgcaacttgcgttcaaagactcgatggttcacgggattctgcaattcacaccaagtatcgcatttcgctacgttcttcatcgatgcaagagccgagatatccgttgccgagagtcattttgttcgtctttcataaatccaagaatttcacctctgactatgaaatacgaatgcccccgactgtccctgttaatcattactccgatcccgaaggccaacacaataggatcagaatcctgtggtgttatcccatgctaatgtatacagagcctggaattaccgcggctgctggcaccagacttgccctccaatggatcctcgttaagggatttagattgtactcattccaattaccagactcaatgagcccgggcagaaatttgaatgatgcgtcgccggcacaaaggccgtgcgatccgacgagttatcatgaatcatcaaagcaacaggcagagcctgtgttgaccttttatctaataaatgcatcccttccagaagtcggggtttgttgcacgtattag

SEQ ID NO: 489 - DNA, 279 bp, Glycine max
atgaaccggaagctgggttacggtgcccaactgcacgctaacctagaccccacaaagggtgttggtcgattaagacagcaggacggtggtcatggaagtcgaaatccgctaaggagagggcgcggcggtcgctgcaaaacccagggcgcgagcccgggcggagcggtcgtcggtgcagatcttggtggtagtagcaaatattcaaatgagaactttgaaggccgaagaggggaaaggttccatgtgaacggcacttgcacatgggttagtcgatcctaa

SEQ ID NO: 490 - DNA, 279 bp, Glycine max; identical to SEQ ID NO: 489

SEQ ID NO: 491 - DNA, 2665 bp, Glycine max
tcgagcagtccaccgacagccgacgggttcgggactgggacccccgtgcccagccctcagagccaatccttttcccgaggttacggatccattttgccgacttcccttgcctacattgttccatcgaccagaggctgttcaccttggagacctgatgcggttatgagtacgaccgggcgtgggaggcactcggtcctccggattttcaagggccgccgggggcgcaccggacaccacgcgacgtgcggtgctcttccagccgctggaccctacctccggctgagccgtttccagggtgggcaggctgttaaacagaaaagatactctttccggggcccccgccgacgtctccggactccctaacgttgccgtcagccgccacgtcccggttcaggaattttaacccgattccctttcggagtacgcgcacagagcgctatcagacgggcttcccccgtcccttaggatcgactaacccatgtgcaagtgccgttcacatggaacctttcccctcttcggccttcaaagttctcatttgaatatttgctactaccaccaagatctgcaccgacgaccgctccgcccgggctcgcgccctgggttttgcagcgaccgccgcgccctcctactcatcggggcttggtccttgccccgacggccgggtataggtcgcgcgctttagcgccatccattttcggggctagttgattcggcaggtgagttgtacacactccttagcggatttcgacttccatgaccaccgtcctgctgtcttaatcgaccaacaccctttgtggggtctaggttagcgcgcagttgggcaccgtaacccagcttccggttcatcccgcatcgccagttctgcttaccaaaaatggcccacttggagctctcgattccatggcgcggctcaacagagcagccgcaccgtcctacctatttaaagtttgagaataggtcgagggcgttgcgcccccgatgcctctaatcattggctttacccgatagaactcgcccgcgggctccagctatcctgagggaaacttcggagggaaccagctactagacggttcgattagtctttcgcccctatacccaagtcagacgaacgatttgcacgtcagtatcgctgcgggcctccaccagagtttcctctggcttcgccccgctcagcatagttcaccatctttcgggtcccgacaggtatgctctcactcgaacccttcacagaagatcagggtcggtcggcggtgcaacccacaggggatcccaccaatcagcttccttgcgccttacgggtttactcgcccgttgactcgcacacatgtcagactccttggtccgtgtttcaagacgggccgaatggggagccacaggccgacgccaggagcgcgcaggtgccgaggcacgccaagggcgcgcgctgccatccacaatcgcgatgatgacgtctccacgagcatatcaacagcccgggcttgggccaccatcgcaatccgcgtcggtcaatgtcccgagtcgatcggcggaccggctctcaccgttccacatccgaccgggacacatcgccggcccccatccgcttccctcccgacaatttcaagcactctttgactctcttttcaaagtccttttcatctttccctcgcggtacttgttcgctatcggaagagccgacatcgaaggatcaaaaagcaacgtcgctatgaacgcttggctgccacaagccagttatccctgtggtaacttttctgacacctctagcttcaaattccgaaggactaaaggatcgataggccacgctttcacggttcgtattcgtactggaaatcagaatcaaacgagcttttacccttttgttccacacgagatttctgttctcgttgagctcatcttaggacacctgcgttatcttttaacagatgtgccgccccagccaaactccccacctgacaatgtcttccgcccggatcgaccggccgaagccgaccttgggtccaaaaagaggggcagtgccccgcttccgattcacggaataagtaaaataacgttaaaagtagtggtatttcactttcgctgtttccagctcccacttatcctacacctctcaagtcatttcacaaagtcggactagagtcaagctcaacagggtcttctttccccgctgattccgccaagcccgttcccttggctgtggtttcgctggatagtagacagggacagtgggaatctcgttaatccattcatgcgcgtcactaattagatgacgaggcatttggctaccttaagagagtcatagttactcccgccgtttacccgcgcttggttgaatttcttcactttgacattcagagcactgggcagaaatcacattgcgtcaacatccgcagggaccatcgcaatgctttgttttaattaaacagtcggattccccttgtccgtaccagttctgagttgactgttcgacgcccggggaagaggccccgaagggcccgttcccaatccgtcccccgaccggcacgcgacgacccgctctcgccgcggaagcagctcgagcagtccaccgacagccgacgggttcgggactgggacccccgtgcccagccctcagagccaatccttttcccgaggttacggatccattttgccgacttccctgcctaca

SEQ ID NO: 492 - DNA, 378 bp, Glycine max
cacgctttcacggttcgtattcgtactggaaatcagaatcaaacgagcttttacccttttgttccacacgagatttctgttctcgttgagctcatcttaggacacctgcgttatcttttaacagatgtgccgccccagccaaactccccacctgacaatgtcttccgcccggatcgaccggccgaagccgaccttggtagtggtatttcactttcgctgtttccagctcccacttatcctacacctctcaagtcatttcacaaagtcggactagagtcaagctcaacagggtcttctttccccgctgattccgccaagcccgttcccttggctgtggtttcgctggatagtagacagggacagtgggaatctcgttaa

SEQ ID NO: 493 - DNA, 816 bp, Glycine max
gatattgatggtattcgtgagcctgtttctggatctctactttatggaaacaatatcatttctggtgccattattcctacttctgcggctataggtttgcacttttatcctatttgggaagcggcatctgttgatgaatggttatataacggcggtccttatgaactaattattctacacttcttacttggtgtagcttgctacatggggcccgctactgctgttttcttgatctatcctattggtcagggaagcttttcagatggtatgcctctaggaatttcaggtacttccaattttatgattgtatttcaggctaagcataatattcttatgcatccatttcacatgttggttgtagctggtgtattcggcggctccttatttagtgctatgcatgattccttggtaacttttagtttgatcagggaaaccacagaaaatgaatctgctaatgaaggttacagatttggtcaagaggaggaaacctataatattgtagttgctcatggttattttggccgattgatcttccaatatgcaagtttcaacaattctcgttctttacatttcttctttgctgcttggcctatagtaggtatttggtttaccgctttaggtatcaacactatggctttcaacttaaatggtttcaatttcaaccaatccgtagttgatagtcaaggtcgtgtaattaatacctgggctgatattattaaccgagctaaccttggtatggaagtaatgcatgaacgtaatgctcataatttccctctagatctagctgcgatcgacgctccatctattaatggataa

SEQ ID NO: 494 - DNA, 2295 bp, Glycine max
agttgtatgttagcattaatcaagcaacacttgttcttcaagctcaaaacttctctcgcccctctctgctcttcggaacgccattcgcattgcactttccccacaccacactgcacaatcaaattccaaagtgcaacccatttcatcatttccccccgtataacaaccatccacccacccaccaacccatcccatgaatttcccaaaaagccctcaacccagaccctcatctccttcctcttcctacattccaccccaccgtacccaactgcaccctcgcatgatctctctctattcttcttcttccccaaatccaaatcccaacaacaaaccccacaccaccagatgcctcttgtttttcttcgccctcctcttcttcaccgcccccttcctcttctacctcttctccaccgccctccaaatccactcctccccaaaattcgccgactcccgccccgcctccttcgccctcgccctccgcgccggcccccacgccctccgcctctctgtcttccacttcctcggccccgcccgtgccctcctcgccgccgctcactccgccgccgcctcccccggcttcgacgccggccctgacgccctccgcggcaccgttgcggagctcatcaagtttgccaaggggagggtgcccaggagggaatggggcaacaccgtggtgcggctggacgccactgaggaggttgaggggctgggcgtcaaggaagcggagaaggttctggaatgtttcagacaggctttgagggtgtccgggttcttgttcaaggatgaatgggcacgagtaatttcgggggaagaacaaggcatctcttcttgggttgctgtaaattatgctcttggaaacttgggacgagaggctcaagaaacaactggaatagttgaacttggtggggcttctttgcaggttacatcagctaaacttaatgcagatttagctcagtctttgcgaactataagattgtctggggttacgtacaacctttacactcagagttggccccaactgggtcaggatgtggtatggaaatcattagaggagggactgaaatatagagagttgaagctttcttcaaaatctagcaaaagaaatataattaatccttgcattcctagagggtatgagtatcctcagatcaccaatgcaagtgatgtaaaacacccaatcttccaaccagctggaaatttctcagcatgcaggtccaaagctgtgtcattgttaaagagaacagaagattcttaggatggctcctaggacttctttgtttcaattggaggcagagggccgacattattgtgaagatcattgggatgctcttaaagatctgcataatgaagttgattatatggatttattgaagtattgtttctcttctgcgtatatgctggcattattgcatgatgttcttgggattgctatggaagagaaaagggttggatttgggaaccggaagattaacagtgatgttgattggacacttggatctttcataactgaaacaatggcagaaccccttgaattggaacatttagatacagggatgattgttgggaatgaatcagtcacatatttttcattatttgcatttcttttcttattcatgcttgctgcattctttgtactgcaatggagaaagccacaattgaagacagtatatgaccttgagaagggacgctatattgttacacgtatacccaggtgacactgttacctcttcctagaatttgttagattcgattttcttcatttgtgaagcacatgcaagttgatgttcttttcatgttcatcctaaacatctcagaaagttatgctccagagcaatattgatatttacttaccagattacagcccctattatgacacagaaaaggatttttggctgtttcatgattataatttttttctcctccttcatatggctttcttttccagatgtgggagagggaaggcgaaagagaagccttaaaatcttgcacattatatttgtaatcaaaagggatgagtagttagatggttatggtaaattaggtagttaattaaattttatctagtatataagtcccactgtatcctaatagttattttctttttaacaattttgtcaaattgatattttcttgattttaatttctctttgtcttgggggctcttgccatgttttcctgcagaggcaagaggccttaaatactgccgttgtaaatgtgtagtttggtaagaatttttattggttcaattttacgttgtattttaattgatgaacaaatgatttagtattttatgca

SEQ ID NO: 495 - DNA, 1953 bp, Glycine max
tagcttctattctattctatacctctctttctcattgttattagttttatagctttaaatttgctgtgcgatttacattgcatctaataaagtaaagtggttactgacacagagaagcatatatagagaaagaaagaaggccctgccctatatagctgaaggcagtgtgcacaaactctgagactgcatattagagtttgagtcttcactctgaagcctaacttgggtttgtgtctctcatagcaagatgatggaaaacggtggcaaacagacatttgaagtctccaatgacacgcttcaacgagtaggttccaagagctttgatgatgatggccgtctcaaaagaactggaactatttggactgcaagtgcccacataataacagctgttattggttctggggtgctatctttggcttgggctattgctcagctaggttggattgctggtcctgtggtgatgattctattctctattgtgacttattatacctcaactcttctagctacttgttaccgttctggtgaccaactcagtggcaagagaaactacacttacacacaagctgttagatcctaccttggcggtttttcggtcaagttttgtgggtgggttcagtatgcgaacctttttggagtggcaattgggtacaccatagcagcttccataagcatgatggcaatcaaaaggtctaattgttatcatagtagcggggggaaaaatccatgcaaaatgaacagcaattggtacatgatttcatatggtgtttcggaaattatcttctcccaaattccagatttccatgagttgtggtggctctctattgtagctgctgtcatgtccttcacatactcattcattggacttggccttggtattggtaaagttataggaaacggaagaattaaaggaagcctaactggtgtaactattgggactgtgacagaatcccaaaaaatttggagaactttccaagcgcttggaaacatagcctttgcttactcctactcaatgatccttattgaaattcaggacacaatcaaatcccctccagcagagtcagagacaatgtccaaggctactttaataagtgttttggtcacaaccgttttctatatgctatgtggttgctttggctatgcttcttttggagatgcaagtccgggaaaccttctcactggctttggcttctataacccattttggctcattgacatagccaatgctggcattgttatccaccttgttggtgcataccaagtttactgccaacccctcttctcattcgtcgaatcaaatgcggcagaaaggttccctaatagtgattttatgagcagagagtttgaagtaccaatccctggttgcaaaccctacaagctcaacctcttcaggttggtttggaggacactttttgtgattttgtcaactgtgatagccatgctcctaccattcttcaatgacattgtagggcttattggagccattggattttggcccctcactgtgtatttaccagtggagatgtatataactcaaactaagataccaaagtggggcataaaatggataggcctacaaatgcttagtgttgcatgctttgtaattactatattagctgcagcaggttccattgctggggttattgatgatcttaaagtttacaagccatttgttaccagctactaattcaataggataattacttagtgatcatgatcaccattgtcagagatttcattagcaacaagaaaaaaaaaagaaggtaaattgttgcaaattgaaatcaacaggaaggtggtcttacttgtttattgcttagtaaccttgtatcttctgtatctttgtttttttttgtttgtgtgtgtgtgttctcttactttgtaacttgctctgtatccctaatttgcaatgagaaatggaggaaatgaagcagaggctttcaaattatcaaa

SEQ ID NO: 496 - DNA, 1900 bp, Glycine max
gaatgctaaataagaagcagcaacctatattgattgtggttcattcttacagtaacggggtatgtaaacatttcaaattgtacaatgggttgcataagttctcattcaatggacatgggtcggattttgccgttgtccgacacaactctaaagtccccaatgctgctggtagaattagagctacattgacctctggaggaggaggagacctaggatcttatctgaagagctctggttttgtgaccaatcatttcagaactggggcacagcttgatgtcatagcatttggaacactgagagcagacacagcagtgccagcaggcagtggtttttctgatgatgaagatgaccatgatttcgatagtccaacggaaggttttgcttccataccggaggccattgaagacattaggaatggaaagatggtagtggttgtagatgatgaggacagggaaaatgaaggagacttgataatggcggcgcagttggcaacacctgaggctatggcttttattgtgaagcatggaactgggatagtttgtataagcatgaaggaggaagatttagagagattggatcttcctttgatggtgaacagtcagtataatgatgagaaacttcgcacagcgttcactgtgacagtggatgctaaacatggtactaccacaggggtgtcagctcatgatagggcaacaacagtcttggcccttgcatccaaagattcacaaccaagtgacttcaaccgcccaggccatattttcccactaaaatacagggagggtggtgtgctgaagagagctggacatacagaagcttcagttgatcttgccatacttgctggtttgaatcctgtggcagttctgtgtgagattgtcgatgatgatggttccatggctagattacctaagcttcgccagtttgcagagcgagaaaatttaaaaattgtatctattgctgacttaataaggtacagaaggaagagagataaactagtagagcgtgctggtgatgcactaataccaacaatgtgggggccatttgtagctaactgctataggtcacttttagatgggattgagcacattgcaatggttaagggtgacattggggatggacatgatgttcttgtaagggtacactcagagtgtctcactggagacatatttggctctgccagatgtgactgtggaaatcagcttgctcttgcaatgcaacagattgaggctgctggtcgaggtgtattggtatatcttcgtggacatgaaggaaggggcattggcttgggccacaagctacgtgcctataacctacaggatgatggacgggacaccgtagaagccaatgaggagttgggattgcctgttgactcaagggaatatggaatcggtgcacagattttgagggacttgggtgttcgatctatgaagctaatgacaaacaatccagcaaaatatgttgggctcaaaggttatggcttgacaatttctggtaggatcccattggtatctcttatcacaaaagagaacaagcgatacttagagaccaaacgtgtgaaaatgggtcacgtatatggctcggaatttaacagcaaattgaaccatcaagacactggcaatggtaaagccaacagtgatgatgattctaatgctgctgctggcttataaaggctctataaatcaggcttcctcaaacatttgtcactccgaaattttatctagtgccatgtttaaggtttgactttcttgctttcttttcgtgttcatgatatataaaggtgatattccaatttccacatataatgtagataatttttctataatttatatagtaggtcaaaaggttgaacttttatagtcaactaggggtattttggtcaattgcaatgtaaaaatagattaaa

SEQ ID NO: 497 - DNA, 2061 bp, Glycine max
atgatgacttccattctctgtcatcctctcagaactaaagatagttattatgatgaagcttatgatggttcaatacaaggacaaagtgacttagagcttggcgccaatttggccaaatgttcagaggagagatgcagatcgaggagaagttgttctaaatgtagtagcagagcaagttatttttcggaacaaggtgatgccatcaagttaacagaaatcaatggaagtgttcaaagagagaaggacataacagtgacatgggagaatttgtgggtcactgtttcaagtgggaagaaaaaaaagccaattctgcaggatcttacaggttatgctcggccaggaaggattctggccataatgggcccttcaggatgtggaaaatctacacttcttgatgctttagcaggaagattgagcacaaacataaagcatacagggaagattctaatcaatggccagaaacaagcactggcctatggaacatcaggctatgtaacacaagatgatgccatgctatcaactttaaccactggggaaactttatactactcagctcagctccaatttccagattccatgtccatagcagagaagaaggaacgagcagatatgacactgagagaaatgggtctgcaagatgccatcaacacaagggttggagggtggggttctaaaggcctcagtgggggacaaaagaggagacttagcatttgcattgagattctaacacgcccgagacttctcttccttgatgaaccaactagtggacttgatagtgcagcttcctattatgttatgagtagaattgcaagtctaaatctaagggacggaattcgaaggactattgttgcatccatccatcagcctagcagtgaaatttttgaacttttccatgacctatgtcttctgtcttctggtgaaacagtatattttggtccagcctctgatgcaaatcagttttttgcttcaaatggtttcccttgcccgactctccacaatccttctgatcactacctaaggatcataaacaaagattttgaacaggatgctgaacaaggctttggaaagggagtaatttcagaaaaagcaattgataaccttgtaaagtcttacaagtcgtctcaaattagaaaacaagttaaaaaggaagtgaataaaataggtgaaagtgattctgatgcaataaggaagcagaggattcatgctgcatttcccactcaatgccttgttcttataagaagagcttccttgcagctgtttcgtgacataagcaattactggttacggttaattgtctttattgtaatagctataagcattggctctatcttctatgacataggcacaagtaatggatctattcaggggagaggttcgctgttcatattttttgtttcagttctgactttcatgacccttgttggtggattttctccacttttggaagaaatcaaggtatttgaacgagagagattgaatgggcactatggtgtcacggcatttctcataggcaacatattctctgctgttccttacatgctattgatatctcttattcctggaggaatagcatactacctttgtggaatgcacaaaggaccagaacgcttcttctacttcacttctttgttatttgccatagtgatgtgggttgagagccttatgttggttgttgggagtatctgccccaactatgtaataggtatgttccttgctggtggagttgaagggctcatgattttaactggtggattctatagactgccaaatgatcttcccaaaccactatggaagtaccctttatactatgtttccttcctcaaatatgccttccaaggatccttcaagaatgactttgaaggcttaacattttctgtagaccaagatggaggagtcaccagaaccgtgagtggtagagaagtactaagtgacacatggcatctggaaatgggttactctaagtgggttgatcttgctatcatgtttggaatgattcttctgtatcgagttttgttcttggtcatcactaagtgcaaggagaagctgaagccttttcactag

SEQ ID NO: 498 - DNA, 537 bp, Glycine max
atggcttcctcaatgatctcctccccagctgttaccaccgtcaaccgtgccggtgccggcatggttgctccattcaccggcctcaaatccatggctggcttccccacgaggaagaccaacaatgacattacctccattgctagcaacggtggaagagtacaatgcatgcaggtgtggccaccaattggcaagaagaagttcgagactctttcctacttgccagacctcgatgatgcccaattggcaaaggaagtcgaataccttctaaggaaaggatggattccttgcttggaattcgagttggagcacggtttcgtgtaccgtgagcacaacaggtcacctggatactatgatggacgctactggaccatgtggaagctgcctatgtttggctgcactgatgcttctcaggtgttgaaggagcttcaagaggctaagactgcataccccaatggcttcatccgtatcattggatttgacaacgttcgccaagtgcagtgcatcagcttcatcgcctacaagcccccaggcttctaa

SEQ ID NO: 499 - DNA, 3057 bp, Glycine max
atgacgttcctcagtatcaccttcttaacactattcttccttcttctctttctctccatagagctccaagcgtacaccccagaagacaacttcaccatcagttgtggcaccaccgggatagtcttcgacggccaaaggacatggacgggggacgcagacacaaagtacttatctggtggtcaaggcagcaccgttttaacccaagcagcaacacaagatccttctgtcaatcaagttccctacaccacagcacggttatccccttctcagttcaattactccttccccgtttctgcgggccccaaattcgttcgcctcttcttctaccctgctgattacccttcctttccccgcactcatgcctctttctccgttcaatctaacggattcaccttcttaaaaggtttcaacgcctctctaaacgctgacgcggaatccaccaaaaccatcttcagggaatatgtggtcaacgtcaacgacggtgacattctcatcctcagcttcactccctcgcaacctaactcctacgctttcatcaatggaatcgaggtactttccatgccaagtgatttgtattacacgtcagcaactgactcaataggattcaagttcttgggaagtaccacgctgtacagcgtagaaaccagatttgcgctgcaggcggagtatagaatcaaaatgggagggcaagaaatatcaccactaaacgacaccggtttgttcaggaaatggaccggtgacgaagaagattatttaatcaaacaaaatccagagaataatgatcttccagctatcacggatggtaagatgaacataaccgtgaatcctgattacgtggcacccaaggaactctacagagcagggcgtagcatgggcacaaacgccactctgaacaaaatcagcaacctgacttgggagttcccggttgattctggcttcacttacgttctcaggctccacttttgcgagcttgaccccgatattaataaagatggtaacagggtgttcttcatttacatagcgagccagttggctgagaaccacgctgatgttatgcaatggagccacaatcagaaaggtctcgctgtgcagagaaactatgccattttaattccgaacgataatactcagaaaaaggttaatctctcgcttcagatgcatccttatgcaactaatgatgaaacgacatacagcgacgcgttcttgaacggtctcgagatcttcaaaatcagtgaggctgggtcaaacaaccttgccggacctaacccggacccggttcagactccacacaacaacatacccgccccaaagggaaaccgcagcagcaaaagcggaacgtcgataatcggcatcgtggcaggtgtggtatccggcgtcgttttgatctcactcatcatccttttcctcatcgtcttcttccgacgcaagacaatcactacgcccaaggactacaacaagtccaagtcctccgcgacctccaagtggggcccactctccttcacaacgaccaagtcaaccaccaccacgaagtcctccctcccctccgatctatgccgccacttctccctcccggagatcaagtccgccaccaacaacttcgacgacgtcttcatcgtcggcgtcggcggattcggccacgtgtacaaaggctacatcgacaacggctccacccccgtcgccatcaagcgcctcaagccgggttcacagcaaggcgcgcacgagttcatgaacgagatcgagatgctatcgcagctccgccacctccacctcgtatctctcataggttattgcaacgagaacaacgagatgatcctcgtctacgacttcatggcgcgtggaacgctacgcgatcatctatacaacaccgacaacccccctctgacgtggaagcagcgcttgcagatctgcatcggcgccgcgcgtggacttcattacctccacaccggcgcgaagcacacgatcatccaccgcgacgtgaaaactaccaacattttgttggatgataagtgggtggccaaggtttcggacttcgggctttcgagaatcgggcccacgggcaacgccaaggcccacgtcagcaccgttgtgaaaggcagcattgggtatttggacccggagtattataaacgacagcgtttaactgagaaatctgacgtgtattcctttggagtggtgctgtttgagttactctgcgctcgtccgcctctgatcagaactgcggagaagaaacaggtgtcgcttgctgattgggcgaggcactgctgccaaaatgggaccataggccagattgtggaccccactttaaaggggaggatggcgccagagtgtttgaggaaattctgcgaggttgcggtgagttgtttgttggacgacggaacgctgaggccgtcgatgaacgacgtcgtttggatgctggagtttgcgttgcagttgcaggagagtgctgagcagcgtgaaaatactaatattgttgataatgaaattaatgagagaagagaggaggaggctagtgatgatttgtttagtactggaaccagtgtgggccaggtttcggattttaacaagagtagcggtgtggtgagtgtgagtactgatagcgaagagcttagtagtagctacaaagagagtgataagttgatgtctgggactgttttctctgagattgtggatccaaagccacgttgagagaatcaaattgatctcaagaatgaagacctaatactactagggctagcttgaggctcgcaagttatgtgtttagtttcataatatatagttgtaatattacaatgtctgtgtacagaaatcaagttgcttctatctcttgggaatctagacaagtgcaaaggttaattggttggaagcatggaataaaggcaagcaattgcagttaaaaagcctcaaacagttccagaagcttgttgctatgctttctgcgcttagcaagcttgtgatgtagatccaggctgaaaatggaaatatcaaaatttaattattgggcagttatatactaacttggtgtttttagaaaggaagagtgaatatttctttacctca

SEQ ID NO: 500 - DNA, 3246 bp, Glycine max
taacagtaaggttgtttcaccttaactggaataggggtgttttctaggtagtttgattcgaatttaggaagtggcaaagcacgcatcaggagttgaatgaagcaatcggaagcaacgtcgttggcggcgaggaagcgtgggaagtggggatacatatggccgatgtggacgtcgctgttgctccacctcctcgccattctcctcttcaccaccggctttctcctcacccgaaccgagcttccttaccacagccactgctccgacgtgtcccactctccttgcttctcttccaacaacaacggatcttgctggaccaaacccgccactaatcgtctcctcatcatcgttctcgatgctctcaggtttgattttgttgctcccagtaccttctttgcagaatcgaaaccatggatggataaactgcgagttttgaagaatgcggcgtctacgcggcctttgtccgctaggattttcaaagccattgctgatccgcctaccacaagtttgcagcgtttgaagggattgacaactggtggacttccgacttttgtggatgttggaaatagctttggtgcacctgcaattgtggaagataacttcataaaccagttggttcaaaacgggaagaaagttgttatgatgggggatgatacatggacacagttatttcctcatcattttgaaagatcatatccatacccttcttttaatgtcaaagatcttcatacggttgacaatggatgcatagagcacctattaccatccctatacgaagaagattgggatgttcttatagcacattttcttggagtggatcatgcaggacatatatttggtgttgactccaccccaatgatagaaaagttggagcaatacaataccattttagagagagttattgaagttctggaaaatcagtctggacctgggagctcacatgaaaatactatgcttgtggtcatgggtgaccatggacaaaccctaaatggtgatcatggcggtgggagtgctgaagaggtggaaactgccatttttgcaatgagttttaagaagcctctttcttctgtgccctcagaatttgattcttgttcttgtcaactagatctggatgggaagaatgtttgtatcagcaccatgcagcagcttgactttgcagtaacagtatcagcattgcttggcatacctttcccttacggaagcattggtcacatcaatcctgaattatatgcattaggagctgatagttggaattcggatgcctctcaaaagctatcagaatcagatatctggatgcagaattatgctaatgcactgtgcataaattcttggcaggtgaagagatatgtagatgcttactcaacttcatcagcggttggattttcccatgatgacttatcacgaatagcaagtgtttatgctcaagtggagaatcattggtcacattccacaaaaaagcttttgcttgatagacaaaatgacagtgatacattagtgcctgcacttaagagacaaattgatgcatacttcaagtttctaacaacagtctctgagttagctcggtctaaatggactgaatttgatttgaacatgatgggaactggcattggaatcatgttagtatcacttatatttcaagtttttactattttaagggcaaacaagaagcatggcgtaatgttctcatcttctggagattcttgcattatcactggctcaattttcacaatttttttactgggcattcgtgcatgcagtttcctttcaaacagttatatcttggaggaagggaaagtagcaaattttcttttgagcacatctggaattgtgacattacgccaatcagttatccaggggaagcttttaaaagaaagcattgggttccttattttgagcactttgtgccgatttgcaattgaagttgggctgtccaagcaggctgccacatctgctttcatgaaagactatacctcatggatcatcaacatagcctcaggtttacctgtatgggactatgcagctgaagttataccaatggtagttctgattctgctggcagcttggctttacaaggccaccagtggcagcttgtttgattggccatggaagtatgtcatactgggcactatcttgagttatatgctaataattgtgcattggatcacagacagtgatagatttggtggcacattgatgtctcaaaacattggaagaacttatatacctagaatcatttatgctattgctttgggacagttgttattattgacatttggccaattatttaagaatagcagtttagattgcaagacaattttagttgcaaaaacaatggccatattatctgcgtggagttcaactgtcattcttctttcaggaaaacagggtcccatggttgcttttgcatccatagttggaggttattttattatgaagtttgttaacgtagaaggtggtaaggatgaacctcatagaagtttttctattatgcaatggagcctctttgctacatgtctctttttctgcagtggtcactggtgtgcatttgatggtctccgctatggtgctgcatttatagggtttgaagaatttgtgcttgttcgccaagcaatcctccttgctatcgatacatttggtttttctatcatccttccagtatttggactcccacttcttgtagcaaccaagtaccaggctaatcttggaaagcattttattttcacacaattatctcaaatgtatacaacatatgggctcataacagcaattacaactactttcacaatattatgtgtcacaattcaaaggcggcacctgatggtttggggtttatttgctccaaagtttgttttcgatgtgttcaatcttattcttacagatgtcttgatctgtttggcctcaatttactattttgatcaagggaaagatgaccaagaattgaaatcataaggttgcttaataacatatatactatgatcgatttacatcttttttccccctttaacttgtgtttttgagttttgtcatgatttgagcttttgctgtttagtatttaacgtagtgaaactgtgaaagcatatgggggcatattgtagtcctcccccttcctgctgcaaagaattttgtgatatagaaatatttataattccaaatgattttttttttatccgaccaaccgatgctttctggtctttgatgatgctagctagtaaaataactcacgacggtcaatacatgaagttgattatt

SEQ ID NO: 501 - DNA, 3084 bp, Glycine max
gccatgtcatttacgaatacacacggagaaagacagcttgaaacacaaaaaatcacgcgcaaaattcgtatctctcagttcctcaccgaagccattctcaattgtagttacagttgccattgcgcaacaaatttgctactctctctatctgtctagggtttcgtgggatcataacaataacacatcttttcataatgcgggatttggagtgaagtgtttgggaatggttagaaggttgattgctaagcattgaggtgagaaaatggattctgcaaggagttggcttcagaagttccagcctcgagataaaaccagggctgctgggaagaaaaaggaggaggatggtaatggaggaaaccaggattcgaatgaacccgtggatgaagcattgttatccagtgtcacgaagcagaaggtggcagcaacaaagcagtacattgaaaatcattacaaggagcaaatgaagaaccttcaggagaggaaggagcgtcgaaccatcttggaaaagaagttggctgatgctgatgtctctgaggaggatcaaaacaacctgcttaaatttttagagaaaaaggaaactgaatatatgcgccttcagaggcataagatgggtgttgatgattttgagttattgacaatgattgggaaaggtgcatttggggaggtcagagtctgtagggagaaaactagtgatcatgtatatgcaatgaagaagctgaaaaaatcagagatgcttcgtagaggccaggttgagcatgttaaagctgaaaggaatctcctcgcagaggttgacagaaattgcatagtcaagctttattgttctttccaagatgatgaatatttgtatcttattatggagtatctaccgggtggggatatgatgactctacttatgagaaaggataccttgactgaagatgaagccagattttatgtaggagaaacaattttggctattgaatctatacataagcacaattatatacatagggatatcaagccagacaacttactacttgatagatatggacacttgaaattgtcagattttggactttgtaaaccattagattgtagtgcacttgaagaaaaggatttttctgtgggtcagaatgtgaatggatctacacaaagctcaactcctaaacgctcacaacaggaacaactgcaacattggcaaatgaacaggaggacacttgcttattccacagttggtacaccagattatattgctccagaagttcttttgaagaaaggttatgggatggaatgtgattggtggtcactgggagctattatgtacgaaatgttggtgggatatccacctttttattctgatgatccaatgttaacatgtaggaagatagtaaattggaaaacttacttgaaatttcctgaagaagctaggctatccccagaagctaaagatcttattagtaaacttttgtgtaatgtcaatcaaaggctggggtcaaaaggtgcagatgaaataaaggctcatccattcttcaaaggtgttgaatgggataagctctatcaaatggaagctgcatttattcctgaggtcaatgatgagttagatactcagaattttgaaaagtttgatgagtctgacagccaaaatcaatcatcatcaagatctggtccatggaggaagatgctttcatctaaggacttgaattttgttggatacacttacaagaactttgaaattgtcaatgattatcaagttcctgggatagctgaactgaagaagaaacagtccaaaccaaagaggccaaccatcaagtcacttttcgaaacatcagaggggtctgatactgatacttctgcaaatgatcaacctgctcaaggaagctttttgaagctcttgccaccccagttagaggtatctcctcatcgcaacaagaatcttcctcccaggtcctaaccggccccaatcacaagatctatgcagtctgacagtgtaggaatcatcataaccatggttttaaattgtggttgcgttgcaatgaatcagaaaacctttatattgcgggttattgtggaaaaatgtggttgatgcattgcggtgagtcaaagtaagttgacattgtgactgtaattgcagttgtggaatgctatttaaaaccatgataataactcatagcattttgactatttccgcgtttaaaaatatcactcttcatgcgttggatttgttctaaagttacactaacggcttggaccagtttcttgtcagtggccacaactattgatttgtaaatctcttgctaagtgtccgtggtcacacatgctacactaaaacagataatatacccgatgtccatgaatactggataccatgtatattcgccttcacttttatattaatgatatcaaagcatttatccctgtaacattggagtgtaatgattgacaagttatttagcagaacaagacctttttgagtttttttaaactgtcgatgacctggttcattttttaatattatttttattatggatggttataccatttccttgctctttctgcacactatgaattcctatgtagtctttagccaagttagcatgatactagtatatttttagaagcaataattacaccttcattctatttacattataaattatatttgttttccgttttctaaatcatatgtacttaaagcatacttattagggtaatgataattacacaaagcaacaaatagtgccttaatacaaattagataggacttttgatattcgtagttttaatgtttttctgtcagcataaaaatcgcaggaacttaaagcaattgcaggcaaatacaaacggttatgattgattgctgcaggaccattacaaggaagaatgattcgaatatgctgctgagacttgagaggtggcatatacctagacactcttgtatttgacttcttatttcttttttttctttttaggtaattggacgtaaaaaacacactcaaaaatacatccttagaaacgttgtctttaaatatgtccttttttttttaacaaatctaaataatattcaatgcttctctgtattttttttctgtatatgtacaatagcaa

SEQ ID NO: 502 - DNA, 3080 bp, Glycine max
gtgatctttgtggaggtttctctaaattgtctttagtttttgtttctttcctagttgtgtggaatagttgcactttaagatttctacaattgaagtgtttctcttctattatcttattctttcccaaatgttgtgcctatttgtcttgcagcttcatcatcattttcaacaaatcaatatgatggtggtgatgggatagagaataagccagaaaagtaaatggagcacccatcaagatgcagatgctcatagacaaagagatgtccaaaaaaaaagactccaagcacaccctaccaaatgtagtagcaaaactaatggggcttgaggcccttccaaggggagagcctcatttatctatggaaagaagccacagaagagactattctcaacaaatgtatggtcctgtaggcttaccattcaagcattggcaacaggaagataggtttatggatagggaaatgcttcatgaagttcatccaagcacagaacaggttgcttacaaagatatgtatgaaatatggcagcaatctcagagagcaagccatgacagaggaaagtggagtgaagatgttgatgagaaaagaatggctctgattcgacagaaattcatggaagcaaaacgtctgtcaaccgatgagagactgcaccaatctgaacaatttaaagatgccttggaagttttaagctccaatagtgatctcttgatcaggttattggattctcaaaatgtttctgatttatactcaacttcacctaatgagacaaagcgcattactcttattaaacctttgaagatggttgacaacgacaaatctgccagaaaggagaaaacgaataatagaccgattaagaaaccatctagtgttgatcaagcaaatcctggaaactctccagatagtcagaaagttgatgaatctccggtccgaaccactcgaatagtgttactaaagccaagcccagggaggacacctgagcaaaaggctgttgtttctccaacaacttcgctgaatctgaaaagcagaaatttccatcatggacctgaatatgatgatgtactagaatccattagagtggcaaatgagatcacacagcaaatgcataaaggcccgaggagctatcaaaaggataaaactctgtattcctcagtgttttccaatggctattctgatgatgagagttcattcaacaaatcatatcatgagtatgcatctgcgaatttcagtgattttgaagctacgtcaatgtcaccattgccaaggctttcgtgggattacaattacatcaatggctatggcagcccttattctagaatgtccttgggccgtgtgccatgctctcccgagtcatcggtgtgcagagaggcaaagaaaagactttctgaaagatggactatgatgacatcagataataagggtcatcaagaacaaaggcaagcaaggaaaagctctaccttgggtgagatgctttctcttacccacaaaaagaaatctgtaacatctgaggttgagagtatcaatgaggaccaagaacctggcaaatctgtttcttgtagtcattctttcaatgcagaaataagcattgagggttctcctaaaaatctccccaggtcaaattctgtgcctgcatcttctactgtatatgaaaatggcctcacagttaaagtaaatgatcataagaatactggcaaagcacaaggctccaaggagcagaaaaagcctaagagtatgagatcatcttttaaagggaaagttgctactttcttgttctcaaggagtaagaaatcaaccaaggaaaaaccaagttcatctcaatctaaagatgcatcccaatctacttccactgtcactgcaacattagttcttccagcaaattcacctggagtccttaggggtgatgtgtctcaaagcatcaatgtggatggttttgaagagtgttctcttgcagcgctatgtgaatcatcagggaaaaattcaacagattcagtctctaacggacatgaagaagacatgattacactagagcctggattgactatgccaaggcccatggtgccagagattcattcaagcgaaaacccagatcagccaagtccaatctcagtgttacaacctccatttgaagattataataataataatgcatcacatgagtccttgaactgtatgaagagtggtgaccaggggtcacaggtgccactgaagtccaatttaattgacaaatcaccacctatagaatcaatagctaggaccctatcatgggatggttctagtgcagaagtggcaagttcctatgcattaaaacccttaatggtttcttccttggactccaaggtagaggatcaagagtggcttctcttggtccacaaactactatcagcagctggacttgatgatcaacaccaacatgactcatcttacactagatggcattcccttgagagcccattggacccatcactgagggacgcattatacgccaatctaaatgagaaggagcctcagccaattatgcatgagcgcagaagaaggaagatgagatcaaaccacaaacttgtgtttgactatgtcaatgctgcactattggaacttgttggttatgggtcagaaaagtgcttaaagagaagtaagagccactacagggtccaagtccaagagggtgcatcagcagcagcatctcccttattggtggaccacattgtggcccaaatgaaggaattaatagcaagtggggtgaggtgtgagtgggaaaatggtggggccagcaccagcctggtggtagaaaatgttgtcagaaaagaggttgtgcaaatagggtgggttgagcttatggaattggagattgatattttggggaaggagattgaaggggacttgattcaagagcttgtggagaatgcagtggttgatttgacaggcagggcctctgagtccctctcttgaacctttctgctttgattcttaaattaaataaatattattgttgttgttgcatttgatcattcacactaccctacatacctaatttattaaattctatgctaccaaataaatttgtagttatttgacattgatgactttgaa

SEQ ID NO: 503 - DNA, 1410 bp, Glycine max
atggaggttgaggtaactccaactctagagaatgacacaataacaacactctatgaagcatcactaaatggctctgtaagtaccttaaacaccctgatccaaaggaaccctctgattctgcatagagtttcactctctccattcagtgaaaccccattacacatagcctctttgctaggacatttggaattctgtgaggcacttcttaaaagaaaaccaagtttagcaagtgaagttgactctgaaagacgttcccctcttcatttggcttgtgctgaagggcacactgaggttgtgaaagctcttttgcatacaaaccctgatgtttgcttggctatggacaaagatgaaatgcttcctctccacttggctgtgatgagaggacacattggagttattaaggagttgaccagagccagaccaggctcaattcaacagaacactattgatgatggttctgttttgcacttgtgtgttaggtataatcatttggaggccttgatattccttgtgcaatcagcaacaaggaaccaacaacagttcctgcttgccagagacaaagagggtgacacagttctgcatttagcagtgaggctcaaacaaattaagaccataaaacacctacttatgctacctgaaatgagaacagcggttagtgctttaaacaaggcaggtttaacagctttggagatgttggtgcgctgtccaagagattttataagcctaaaaattgaaaagatgttacttgaagctggagttcaaactggcactgcacaacaagggtcaccatcaccaagaatagctactcaaccatcacatcaatccaagagaagcaatatatgggaaacattatggttaagatacttaaaataccaaagtaattggatagaagagaaaagaggaacattgatggtagtagccactgtaattgccaccatgacttttcagtcagcaataaatccaccaggtggggtttggcaagaagacacaataactggtggactcaactgcactacttatggcatttgtaaagcaggcactgcagttttagcatatgatttgccacatgggtttctgaaattcatgaccttcaacaccacctctttcttctcctctcttgctgtggtgctgcttctcataagcggttttcgccttgagaacaagctcatgatgtggatcttgaccatggctatgacttcggcgatcacattcatgggactcacatacttttgggcacagagcttggtcacccctgatcacattgttgataaagttaataggatgggaattcctttgtccatagtgtgggtgatcatgcttctagtggttggtttggttcatggggttaacttgttcttgtgggtaaagaagtttgtaaagaagtggaagcagaagctgctgcatggctaa

SEQ ID NO: 504 - DNA, 1910 bp, Glycine max
taagtcaacgaatcccgaacctaatatttttgtattttcccccaaaaagtcatacatgccattttttaccggatccatgatgctccaagaaaaccacgatgctgctatcagccaaatttttgtttggttgtcttgctattctctttttcttctaagctatttgattggatgataaaaggatccaagtatcaatatcaattgatttgattagtggcagttccaacaatggaggttgaggtaactccaactctagagaatgacacaataacaacactctatgaagcatcactaaatggctctgtaagtaccttaaacaccctgatccaaaggaaccctctgattctgcatagagtttcactctctccattcagtgaaaccccattacacatagcctctttgctaggacatttggaattctgtgaggcacttcttaaaagaaaaccaagtttagcaagtgaagttgactctgaaagacgttcccctcttcatttggcttgtgctgaagggcacactgaggttgtgaaagctcttttgcatacaaaccctgatgtttgcttggctatggacaaagatgaaatgcttcctctccacttggctgtgatgagaggacacattggagttattaaggagttgaccagagccagaccaggctcaattcaacagaacactattgatgatggttctgttttgcacttgtgtgttaggtataatcatttggaggccttgatattccttgtgcaatcagcaacaaggaaccaacaacagttcctgcttgccagagacaaagagggtgacacagttctgcatttagcagtgaggctcaaacaaattaagaccataaaacacctacttatgctacctgaaatgagaacagcggttagtgctttaaacaaggcaggtttaacagctttggagatgttggtgcgctgtccaagagattttataagcctaaaaattgaaaagatgttacttgaagctggagttcaaactggcactgcacaacaagggtcaccatcaccaagaatagctactcaaccatcacatcaatccaagagaagcaatatatgggaaacattatggttaagatacttaaaataccaaagtaattggatagaagagaaaagaggaacattgatggtagtagccactgtaattgccaccatgacttttcagtcagcaataaatccaccaggtggggtttggcaagaagacacaataactggtggactcaactgcactacttatggcatttgtaaagcaggcactgcagttttagcatatgatttgccacatgggtttctgaaattcatgaccttcaacaccacctctttcttctcctctcttgctgtggtgctgcttctcataagcggttttcgccttgagaacaagctcatgatgtggatcttgaccatggctatgacttcggcgatcacattcatgggactcacatacttttgggcacagagcttggtcacccctgatcacattgttgataaagttaataggatgggaattcctttgtccatagtgtgggtgatcatgcttctagtggttggtttggttcatggggttaacttgttcttgtgggtaaagaagtttgtaaagaagtggaagcagaagctgctgcatggctaaaagtcattgctcttgtgggtaaagaagtttgtaaagaagtggaagcagaagctgctgcatggctaaaagtcattgctcgcgagttagtccagtgaatgagaattacagttacccctttgaagtttgcaatataaaataataattcttgcatatccagttgttagttagagaaataggattgtgacaacaactaagataaaattattgtgattggatataatcatcacatggaatctaaaaaaattatgtgttaaaataatttcaactgcagcgag

SEQ ID NO: 505 - DNA, 1913 bp, Glycine max
attcttgaggctcaacaaattaaattagtggttaaggttgttggaggagctctaacaagagatggagacacaaaattggttcgaaagagtgaagcctttagcagctgtggtatcaatgcagtttggatatgcagctatggatgttctatccaaggctgcaatgaacaaagggatgagcaactatgtgtttgtcgtttatcgtcatgctgttgcattctttgttatggcccctttggcatggttttttgacaagaaagtaaggccaaagatgacattatcaattttcatgaagatagcggtgctcagcttgctagagccagttattgaccagaatttgtattttttggggatgaagtacacaacagcaacctttgccgttgccacgaccaatatgcttcctgccattacctttatcttcgcatgcattcttaggcttgagaagataaaaataaaaagtataaggagccaagcaaaggtggtaggaactctagcaactgtttcgggtgccatggttatgacactgctgaaaggtcccgtacttttagggtcacacagaagcaatgatcacggccagcacaatgggacaagtatgcagcatacaataaccggattcataatgatcacaattggatgctttagttgggcttgtttcgtgatcctacaagctattacgcttaaaacctaccctgctgaactctctctttctgcgtggatatgcttaatgggcacaattgaaggtgccgcagtggctttgattatggaaaggggcaacccttcagtttggtctctaaaattggacatgaaactgctatgtgcagtctacactggcatagtgtgctcgggaatgggctattacttgcaaggagtagtgatgaaaactagaggcccagtcttcgtaacagcttttagtcccctctgcatggtaatcgtggctgtcatgagctactttattctggccgaacaagtgtttcttggaagaatgatcggtgccgttattatttgtttgggcctatacgttgtggtgtgggggaaaagcaaagattatagcccaccaaacccaaatactcaagagcccacattaccggcaaaacaaatagtaaatgaggacaatgctaagaaggagaattacaattgcactcacgaagtcatcaacgtcaacaattttggaaatggaatcactagaaatgaagaactagtgtgaggaaagctttaccatttactatctaaaattcaactattctaggacattccagctatgccagtgttcctagttgtttaatctttcaattacgatttacgagagcatagatttttaacgtgttgtaagttatctcaacaaggcaggtagataactaaaaaatagtagtgaaactttgaaaatagattatgatgttgcatataactaaatgtcaaggtgtaacagcagcaataaaagacaaaggtacctatcaaacttccttttgtcagcctacagatgataccaggaatttgcaagtgtatctaattatacgatatttcgatttgagatatggtccacatacaacaacaaaagaaaatggtaataatagagtattaataagactacagaccttgacaacaaaatcaatttcccttcttgaaatttatcaactatatgctaccatgatagatccaatttgcaatacatatttccattttgtttggagagttccctactattttcatcaaagatgagtttatcttcaaatgggtaaagggttcaaaacttatgatgcattgacaatcggtcagcaaaaggtgtatcaaaacattactcctatgaaaccaacaaagattgtcctatcttgtaactcaaaattgctcctttataacaattgttttacttcttgttttgcccatatgcgctggagttccctgctgtaggcaaaaaagat

SEQ ID NO: 506 - DNA, 2577 bp, Glycine max
aacatcatctgcatctctctctctctctctctccctcccagtttccacctttccttccctacaaagtactacaaaccaataaaggcaaacaagctggaagctacaggtcactgtgacatatcacatatacacttttatgtgttggtgttacctctcttcacatcattaacaaaaggggaagaactaaggagcatcaaacccgggattataaacagtctgtttcatatccactctctccttctgaatcattttcactcaaactgaaaccccacaccacacccccatatttttcaattctcttggagaagaacaatgagaacagagttgaagaagaagatatccaagtcttcatggccaaaatttaatgtaagaaagtggctcaatataaggagcaacgatgataaatttcactcagatgcgtcatattactctttaccagaggggtggctgatggactccacaaatgaattgaaacattcggcatcagtgatggaggcaccatctgtcattgacattgacacgctcaaccttaggatgttcgtggggacttggaatgttggaggaaagtcacccaacgagggattgaacttgagggattggttgatgttgccttcacaagctgacatctatgtcattgggttccaagaaattatacctctaaacgcaggaaacgtgcttgggccagaggacagtggcccagcatcgaaatggctgaaccttattcgtcaagccttgaactctaacacaagctccagtggagaaaattctcctacatcgtcttttaacagtagaaggcaatgctgcccaaatgaacaacactattattgcctagcagcaagcaaacaaatggtgggtatcttcttgtgtgtgtgggtacgtgcggatctttacaagcatgtcagcaagttaaaggtgtcttgtgttggtagaggcatcatgggctatctaggaaataagggttcaatatcaattagcatgacattgtaccacacaacgttctgcttcgtttgtacccacttggcctccggagagaaagatggtgatgaggtgcgaagaaatttggacgtttcagagatattaaagaaaactaaattttcacactcattcaaagcacttggccaaccactccctcctgaaagcatattagagcatgataagataatttggcttggggatttgaattatcgccttgctgctgcttacgatgatacacttgggctgctgaagaagaatgattggcaggcactattagagaaggatcagctaaggatagagcagagagctggtcgagtattcaaagagtggaaggaagggaagatatactttgctccaacttacaaatatttatttgattctgaccaatatgttgcccaaactaacaagtccaaggaaaaacgacgaactccggcttggtgtgatcgaattctatggagaggtgaaggcgtggagcagctatggtatgtgcgaggagagtccaaattctcagaccacaggccagtgtattcactattctcggttgacgtggacttgacatgtaacaagctaagtagtccctctattgctgcatcagatagcagctcaataatctcaacaaggtcgtgttcctctagacccttaacaaacgctgccttgtcctcatcttgctttgctaaagttcaggctgaggaacaacttttgttactaaccagggtacatagacacagggttctgacttagtacataggatactatacaaacactttccgagaaagtaaagtaagtacataagagacacgaccaccaagttgccgcagctcgcggtgtgccctgacaaagcgtaaagtgagggaaaatcaaacattagttgtcatggttcgggttctgtgttcctcactttttttgttgaaacagaggatggattagtcttttatggggtaaaaagattaggttcttttccaaggatattgctaaaaagtgttttttagcatattggttaagaaattaaaagaaaaaaatatttattgtaaaaattatagaagaatataaaaaaataattaacaacataattttatacatctctataagaaaatctttcttattttaatttcttaagcaatactctaagaatacttcctagatggcctttgcccttttcataattgctctcatgcgagccttggcaatttggcatgcacccttctggcccagatgaaaactatgtgacatgttgagctagcaatgattagaggactgcatttggtgtaaaaagtgagaaacagaagcgtggcagcgattgaagtgaagaaaataatggctcgatgtgtgggaatctctaatcatgcgtgctctttttttaagctttttgggtattagaggcttagctttttttatataagcttggaatcttgaaaaggtttggttgttttagtagaggccgggggatgatttgcattttgataatcggatcggtggaggtgagattgatagctgttgaaagttgtaaattaaactgtttatcagttttgttatcgttattcaatacaatgtatggaattttgttatgtgaaaaatctatagcagcttagtataatatttgtt

SEQ ID NO: 507 - DNA, 1624 bp, Glycine max
tagaactttacgaatagatataaaaagattatttatcttggtccgccgtgcctatttcatctcattatcaaccctagctagaactcaaaggtaaatgcaaatgggctataaaaacctagccaactttttgtaccaccaaagctgacttgacatttaccaaatttggaagatcactgttggaggatcagcacaacccccttcaactcctagtgaaatacaagaagtgatcttcagtcatatatttcagtaattcttgtgaaattaagttcaccggtcttcgcattctaggcatcaagtcaaggttcttgagaagaaaagaagtggaactgaaaactgagtatggaaactgaaaattgcgaaacttttggcacaacctcactagatactactagtgttggtattgttggccactataagttcgaaaatgggtcatctcagtttgctttcatgaaagttgagaatgaaagaggagtttcccttgaccattccctcagcttctctactgaaaattttgtgcagacccttgcattttgcaacagcttgattctcatgtctggttttagtggtgacaaatcctgttaccatgtgttgaatcccttcaccaagcacaatgtcatgatccctcaaactagtatccaagggggtgttgttagagttggattggcctatgatggagaccaattttttgatgttgttcttgttgaagcagggtcctcaaattccaatggactaaaactgcatgttttctcttctgaaactggccaatggaggtgccactaccccatcaatttagctgctgccccttctttgccagaacatgagttccaagaacttggaacacctcctctttacgcgaacggcgcgattcattgggaaatagatggatatttgttggtgtatcaagtccaaggcagccaatgtgcactatatgaactaccaaactactttgagggttggtcttggcaatcaacactgccttaccgccgttgcttgtgcgaatcaggaggcaaggtgtactattgctactccgatttcgatggctttcacatttggaatctcctcaatgagcaagaccatcttgaattcttcaattattatgattacaaaaggtttccatggaaactagttcatagtgtcatgcatgaagtgcttatgcctaagaaccaaaacttttttggcagcttctttgattgggagccttacaaggttgcacctattgcctacatcgaagaagcacagatcatatatttgcagcttccaggaactgttgttgcttacaactttgacacaggaactatggaatcaatctgcaactactcttatccaggcttaaacttcagttgctgctcattcttttcttcaactactactctgcctcacaatgcacagagagacaacactgatggagaattggagctgaatctacccatagcagagatggaaaagttaaccctctaaatcaagttttaattttcacattttgcttggtaaacaattatatgtggaagtagtatccatatgttgtgtagaacaactttttgaatcccttattcgctgagacattgttatattttatcatttgtatttagacctatgtggccatcaagcacttttttagactgtg

SEQ ID NO: 508 - DNA, 3021 bp, Glycine max
tcagacgctgactaacaaagcactgctagcagaaaaaggaaaagcttataggtgttaacgtggcagcatccaactcgcaatgtgacaaaactttgacggtcagctcaacctatacaagctcgtacctcacaatccccaacgtaaagtgggacccactgagcttacccaacacaactgtgtgattaattgcttaaccggagacatcaaggcaatggcataataatgatagcgaaacaaggaaagggagaagaatccgataattgagggtgcggtgtgtggtgtgtagtgtgacagagatggacgccgtagcaacaggttcggagctgaacaagtccggaagcggaggttcggaacgaagcgaggacagcggaggagctggaggaggagggatatttgagtactctgggtgggtttatcatttgggagtgaattccattggccatgagtactgtcatctccgattcctcttcattaggggaaagtatgtctccatgtacaagcgtgatcctcacgataaccctggcctcaaacccatcaggcagggaattgtaggacccacgctaatggtggaggagctaggtcgtcgaaaggtcaacaatggggatctttatgttttacggttttacaatcgattagatgagaccaaaaagggagaaattgcttgcgccacagctggggatgccaggggatggatggaagcatttgatcaggccaagcaacaggctgagtatgagctgtcaagaggagttagtgccagagacaaactaaacatggaggccgagatcaatcttgaaggacatcgacctagagtcagacgatatgcccatgggttgaggaagcttataagaattggccaaggcccagagaaactgttacgacaatcatcaaagttggctgttaggccagaggggtttgcaggggacagtggagatgcagttgaagcacatcaatggaaatgtgttcttactatggctggtattagaatttttgaggatgtttctgatcacaagaatggtaagggtgttcttgcaaagtctgttggtgttattgatgcaactgcagatactgtttttgaagtgattttgagcactgaacaacagaaaagatacgagtgggatacattgatgtgtgacttggaactgatagattcttatgatggacactacgatgttgtttatgggacatatgattctaagtatctatcccggtggcactcaaagcaggattttgtcttctctaggcaatggtttcggggacaagatggaacatacactatcttgcaatttccagctatacataagaaaaagcctcaaagatctggatatcgacgtgcaaaagttaatccatcttcgtgggagattagaaatttgaacacatctatggcatcaaagagcccaagatgtttagtgacccacactttagagatacactcttcatcctggtgtcaatggaagaacaacaagagctcaaaatttgagaggagcattccatatgcactattgtgccaagtgtcaggtctgaaggaatacattgcagccaatcctgcactccaccatgaaaatggcaccacaattgttcattccaaattgtctgatgcttctatttctagtgctgaatatgaggatgaaatgcaggatgagttttatgatgcaattactgctgattcatcaacatcagacgaagaaagtgatgatgatcagaagcttgttctgcaggagccaagagtcaaactaaagaatatttcatgggcaatcacaaccttagctttgaagcgaactgcagctcctgatctaactgaagaactggatcctcatgtaactcatatcacaattccaagtgacttgcatggttctttgtgcaaaggaaaggatgataatgacacaaactgttgggcttctcctagcggaaaaggatttatgattagaggaaagaattatcttaaagatagttctaaggtagttggaggagatcctcttctcaagcttatagcagttgattggtttacagttgataaatccgcagatagaatttcccttcaccctaaatgtctggttcagtcagaagccgggaaaaagcttccatttatccttgtcattaatctccaggttcctgctaaaccaaactacagtctggttctatattatgcagctgacagaccgataaataaaaattctttgttagctaagtttgttgatggaagtgatgcatttcgagactcaagattcaaacttattccaagtatagttgagggatattggatggtcaagagagctgtaggaaccaaagcttgcctcttaggaaaagctgtgacttgtaaatactttagacaagataattttttggagattgatgtggacattggatcatcttctgtagccaggagtgtcattggctttgtcctgggatatgttacgagtttagttgttgaccttgcaattttgatagaggcaaaagaagaggcggagctgccagagtacattcttggaactgttcgattaaaccgtttgaaacttgagtctgctgtaccattggaggtttaagagagagaaacaatggaggctttcgatgagagctagtacttcgaaatcagattgatcaggagaaagagcttcacgtaagcgtgaacgctgatatgattagggaggacgaggaggagctgcaatgggtagcactattgagattgtcattgcagaagcgcatcaactatgctctccttcgtgccttcccttctcaccagcatcctttctcgttggcatcgagaacttaatggatgtcaaaaaactcagccgctctcatcacgaacaagtcgttaagacaacacttgctaccacgacaagacaactaccacctcctctcctccatcaaagaacgcctcaataggtttcgctttcaaatcatcaattatatataaattatcatatatgtttgtgatttttcaaaattacagatctataattatatattactatttttgttgctttttgttttactgcaatgcgatggggttggaatggaagtgac

SEQ ID NO: 509 - DNA, 1849 bp, Glycine max
tttataaatcaatcaattggcttcttcttttttctcatcactcgggtggcgtgctttggcttcccttccccctcttcttagcaaatgtttcaatattccaaggccatgttgcttaatttagttcttgtttcctttgtcctcttgagttctatcagagatgggagtgcagggatcaccagctctttcgttcggccacagtggccaggagttgacattcccgtggatcatgaagtatttgcagttccaaagggttataatgcacctcaacaagtgcacatcacgcaaggtgactatgatggaaaagcagtaatagtctcatgggtgaccccagatgaaccagggactcgccatgtgcaatatggcacatcaaaggataagtttaaaactagtgcagaaggcacagttgcaaactacactttctataactacaagtctggctacattcatcattgtcttattgaaggccttgagtataagacaaaatactactatagaattggaagtggtgattctgctcgagacttttggttcgaaacacctcctaaagttgggccagatactccctacaaatttgggatcattggtgatttggggcaaacgtttaattctctttcgacccttgagcattatttggagagtggaggagaggctgtgttatatgttggagatctttcttattctgatgaacatgactacaaagatatgggtttacggtgggatacatggggccgatttgctgaaaggagtgcagcatatcagccatggatgtggaatgtgggaaaccacgaagtagagtttttgcctgaagtgggagaagttgaacctttcaaaaactatctttaccgatatactactccctattcggcttccaaaagcaccagccccctctggtatgcagtcaggcgtgcctctgctcatatcattgtgctatcaagctattctccatttgtgaagtacacgcctcaatacatatggcttaaagaagagctggcgcgggttgatagaaagaagacaccttggctcattgtgctcgtgcacaagccactctacagcagcaacgtagctcactacatggagggtgaagccatgcgatcagtttttgagacatggttcgtccaatacaaagttgatgtcatctttgccggccatgtccatgcttatgaaagatcatatcgatactccaatatagactacaacataactggcggtagaaggtatcccatacctgacaaatcagcacctatttacataacaatcggagatggaggaaatctagaaggtcttgcctcaagttatttggatccacagccagaatattctgcattcagagaagcgagctatggacacgccacactggagataaaaaacaggacccatgctatctaccactggtatcgcaatgatgacggaaagaaagtcccagctgactctctcgtattgcataaccagtattggggaagcaatggaagaaaacagaatgaggttattgatgaagttgtcaatgttaaatgaagttggagcactcgtaaatcgtaaatatggtgttttgaaaagaataaaaatgtgcctatatattgtaatgtatgtagttcaatagtctccgagcgtgcgaaaaggttccattccatgtacttggcttgtattatacagctagcgctaagaaatattaaataaacgcgcttttagcaaggagaaaacaatcgagaccaagatattatctgttcacatctgtgtataatttttgaagcgtggattattttgctgctatttgagtgctttagtgggtattattatatcatgtcaaccttcagcaaaaataataataataaattatatatatcatgtcaac

SEQ ID NO: 510 - DNA, 1602 bp, Glycine max
atgcaaatcttcgttaagacactcactggtaagacaatcacccttgaggtggagagttcagataccatagataatgtaaagtccaagattcaagacaaggaagggatcccaccagaccagcaacgtctcatttttgctggcaagcagcttgaggatggacgtacacttgctgattacaacatccaaaaggagtccactcttcacttggtgctccggctccgtggtggaatgcaaatctttgttaagacattgaccggaaagacaatcacccttgaggtcgagagctctgacaccattgacaatgttaaggctaagattcaggacaaagagggtatcccaccagaccaacaaaggcttatctttgcaggaaagcagctagaagatggcagaaccttggctgattacaatatccagaaggaatctaccctccacttggtgctccgtcttcgtggtgggatgcaaatctttgtcaagaccttgactggaaagacaattacccttgaggtggagagttctgacaccattgacaatgtcaaggctaagattcaagacaaagagggtatcccacccgaccaacagagactgatctttgctggaaagcagcttgaggatggccgtacccttgccgattacaacattcagaaagagtccaccctccacctggtgctccgtcttcgtggtggcatgcaaatctttgtcaagaccctcactggaaagaccatcacccttgaggtggagagctctgacactattgacaatgtcaaagctaagattcaagacaaagaaggtatcccaccagaccaacagaggctcatttttgctggaaaacagcttgaggatggccgtacccttgccgattacaacattcagaaagagtccaccctccacctggtgctccgtcttcgtggtggcatgcaaatctttgtcaagaccctcactggaaagaccatcacccttgaggtggagagctctgacactattgacaatgtcaaagctaagattcaagacaaagaaggtatcccaccagaccaacagaggctcatttttgctggaaaacagcttgaagatggccgaaccttggcagattacaacatccagaaagaatctaccctccacttggtgctccgtcttcgcggtggtatgcaaatctttgtgaagactcttactgggaagaccattactttggaggtagagagctctgacacaattgacaatgtgaaggccaagatccaagacaaggagggtattcctccagaccagcaaaggttgatttttgctgggaagcagcttgaagatggacgcacgctggcagactacaacattcaaaaggagtctacccttcaccttgtccttcgtctgaggggaggtatgcagatctttgtgaagactttgacaggaaaaactatcaccttggaggttgaaagttcagacacaattgataatgtcaaggcaaaaatacaggacaaggaaggtatccccccagaccaacagaggttgatctttgctgggaagcaactggaggatggaaggactcttgctgactacaacattcagaaagagtctactcttcaccttgtcttgcgtcttcgtggtgggttttga

SEQ ID NO: 511 - DNA, 1225 bp, Glycine max
ggcatcagcccctataaatcaaccactgccatactcatatgataccaacacaactctcctctcctctctctctctctctctctctctctctctctgcttcacttgcttgaagcaatggccaaagccttggcatcagtgctgctgtttctcctcgtagctgtgagtaatgtgtttgctgtagagcttgaacttgaaactcttccaccctcttaccctcaccctcaccctgttcactcccccacaccagcacctcttcacccaccagcaaatgctcctcacccacaccaccaccaccaccaccaccaccctccagcaccagcaccagcaccagcacctgttccttcaccttctcaccacaattaccctcctacccctgcccctgctaagcctcctactcaccaccatcaccatcaccctcctgctcctgttaatccacctcctgttccggttcatcctccagttaaacctcctgttccggttcaccctccagttaaacctcctgttccggttcaccctccagttaaacctcctgttccggctcaccctcctgttaaacctccggttgttccggttcaccctcctgttaaacctccggttgttccggttcacccctttcctagaagctttgtcgcagttcaaggagttgtttatgttaagtcctgcaagtatgctggggttgacaccctcttgggagccacaccactacttggtgccgttgtgaagctccaatgcaacaacaccaagtacaagctggttcaaacaagtaaatctgacaagaacggctacttctacattgaagcaccaaagagcataaccacgtacggggcccacaagtgtaacgtggttttggttagtgcaccctatgggcttaaggcctcaaatctccatggtggtgtcactggtgctcttctcaggcccgagaagcctttcttgtctaagaggcttccttttgtgctctacactgttgggcctcttgcatttgagcccaattgccattaaatgcaagaaattatggatatatcatatttcaagttattttaagttatatgatagagctgtgttgtctctaatttgccttctttctggccttgttttgtttgtcttcatttttatttgtggttttgcgtttgtaggctctgggcttgaattgatcatacacaataatgagtgacagtacgtatgaaatggatagttctagtatgaaattaattcttgtgtaaaagaa

SEQ ID NO: 512 - DNA, 1829 bp, Glycine max
atggcttctatcttccctatttctcgtatgtccttcactgatttctctgcacccctttcccatttccataacaaaccaaaacgccatcatgtttccaaagtgtcatgccatagtaaccaaaacaactcagcaccaaacccagaagaaggaaaaccatcacacaacattgtagctggaaaaaataggagggatgttctcattggctttggaggactttatggtgcttcaactcttaccaacaataacaacaacaaccctttagccatagctgctcccattctccctcctgacctaaaaacctgtggtccacctgacttagcaactggtgcaaaacctgttaattgttgccctccaatatcttctaccatcatagacttcaagctcccttcttctggagcaccccttagggttagaccagctgctcatttagtcaacgatgtctacatagccaagtatagggaagcccttaagcgcatgaaagccctttcacctaatgaccctcgaaatttcacccaacaagctaatgtccattgtgcttattgtgatggtgcctatcaccaagtagggtttcctaaccttgacctccaagtccacaactgttggctattcttcccttaccaccgttggtacctttatttctatgagagaatcttgggaaacttgattggtgacccaactttcgctcttccattttggaactgggacaatcctaaaggtggcatgacaatcccttccttttacgtagataaaaactcacctttgtatgaccctcttaggaatcttaatcatcaacccccagttctcatagacctagactataacagaagggacgatgatgatcctagtgctagtgaaagtgtagatcccaatgaacaaatcgctagcaacctttctataatgtataggaatgttatctccaatgggaaactcccaaggcttttccttggaagcccttatcgtgctggagatgaacctgaacctggtgctggctctttggagaacgttccacatggtcctgttcactcttggactggtgataagagagagcctaaccgtgagaacatgggaatcttctattctgctgcgagagaccccattttcttttctcaccatgccaacgtggataggatgtggagcatatggaaaacaataccaggtgggaaaagaagggatttcactgaccctgattggttagagtccgcatttttcttctacgatgagaacaagaaccttgtgcgcgtgaaggtgaaggattctcttgacacaagaaagttggggtatgtttaccaagatgttgacattccatggctcaagaataagcctaaacctaaaagatctaaagctaagaagttggcattggcacaagattttatagttggtgcagcacaagctgttgagactacaccaaagagtgttaagttccctttaactttggattcaaaggtaagcacacttgttaaaaggccaaagctgttgaggagcaaggaggagaaggaagaagaggaggaggtgttggtgattgatgggattgagtttgataggaataaagcggtgaagtttgatgtatttatcaatgatgaagatgacaaggtgataacacctagtaatactgagtttgcgggaagctttgtgagtgtgcctcattcacatgtgcacaaaaacaagaagatcaaaacttgctttagagtgggattaacggatttgttagaagacttagaagctgaaaatgatgatagcattttggtgacgttggtacctaagtatgggaaaggacttgttacaattcgggacattaagatagagctcgaaacggaatgaaaatatgtaac

SEQ ID NO: 513 - DNA, 945 bp, Glycine max
atggctacccttattgctcccatcaccttttcacctggtttagatgcagaagctcttagaaaagctttccaaggatgggggaccgatgagaaaaccgttattgcaatactgggtcatagaaatgttcatcagaggcaacaaatcagaaaggtttatgaggaaatttaccaagaggacctcattaaacgcctggagtctgagctctctggtgactttgagagagctgtgtaccgttggatgctggaacctgcagatcgtgatgctgttttggccaatgttgccatcaagaatggcagcaaaggttaccatgtgattgtggaaattgcttgtgtgctttcagctgacgaggtcttggcagtgaagcgtgcctatcacaaccgttacaagagatctttggaagaagatgtggctactaataccactggtgatattcgccagctgttggttgggttggtgacagcatataggtatgatggtgatgaggtcaatgcaaaattggccaaaactgaagctgatattcttcatgaatctatcaaggagaaaaagggcaaccatgaagaagccatcaggatcctcaccacaaggagcaagacacaacttctggcaactttcaaccgctacagagatgaccatggcgcttccataactaagaaattgttggataatgcatctactgacttccagaaagcattgcacactgctattagatgtatcaatgaccacaaaaagtactatgaaaaggttctgcgcaatgcgataaaaggggttggaactgatgaggatgcactcacccgtgtggtggtctcaagggctgagaaggacctcagggacatcaaagagctttattataagagaaatagtgttcaccttgaggatgcagtggccaaggaaatctcaggggactacaagaaattcatcctcactctgttggggaaggaagattga

SEQ ID NO: 514 - DNA, 1147 bp, Glycine max
ctcgatgagtcggactttgcttgttgttttccccgttgagagttcagaattcagatattcccttcgtgtgtttcgtaacttattcggtatccttaaatcgcaactcaaaaccctagccattgaatttgggcacggatcttctcccacgctatctcaggtaacatgcctgagaatccactgcagaccttgttccataacattgaacaagtctcaagctttgttcaacaccatctctctaatttcataggccttcatcaccacccatcttcaggacccctcttgtccatctcttcctccaccaaaggcccactttcaaaaactgcaacttctgtacaactcgctgatactgctgtcaaggaaaagtctgctgccccagtgactaaggaagagcttggaagggctacttggactttccttcacattcttgcagctcagtacccggataatcctacaagacaacagaagaaggatgtaaaagaactggtacagatgttacctcgaatatacccttgcagggaatgtcgagatcactttaaagaagttcttagagcaaatcctgtactgactggatcacatgctgaattttctcagtggctatgtcatgtgcataatgttgttaatagaagccttgccaaaccgatattcccctgtgaacgagttgatgcaaggtggggcaaactggactgtgaacagaatgcatgtgaaattattggaagtacatcaatttttgggaggatatggcagaaatctacgtaaaaatgattgccacacatactatgtgagatgtgttaaattttgacctttagaaaaatggtttagataggccaagggttatttgatggcattacaccggagtacgtgaatacatattcataactcgaattattttagaaaattaatagttaagcccggtttatattgattttttgagcatcacaatcagagatgtagttgccagagcttgtcaattctttacaagaattattctatgtgctcgtgcgttgtgtaatattttaatccctttgtaactgatttcgttaataggaatattgtttccttacatcccgaccggatgacataatgattagacattgtgtgctcacacgttgtgggatgattcataaatagcgaaaaaatcttgtgtttt

SEQ ID NO: 515 - DNA, 1212 bp, Glycine max
atggcttcctcttccctctttctctcactctctctcaccctttgccttgtttcctctctctgctatgctcacaaatcttccttaaccctacctgtgacaaaagacgattcaacccaccaatacctaacaaccctctcttatggcacccctgttgagtctgcaaaattcgtgcttgatctcggaggctcaatcctctgggctgactgtgcatccagaaccaccccatcttccacccttgccccaatcttccaccgttcaattcgctgcctcacggcaaagggtcctgaaattgagacacatagatggctctcgagtctcgcaaatcccatagatcaagatcagccgtgtcaaattcctgcagagaacagcatctcggggaaaagggtcaccgaaggagagcttgtggaagacttagtgattaatcgctctcacgagcttctcttcacttgctcacccactcttctcttgaacggtttagctaccggtgccaaaggcatggtaggtcttgatcgatctcgcacttctttttcgtctcaggtttttcactcacttggaactcagagaaaaatcactctttgtctctcttcctcttctgggattgttcaatttgggaatgtggcgcatgaatcccaacccgggtctgaaattttcagatctcttacttttacaccccttgtcgcgaaccaagaccaaacacagacacacccttccatcaacgttaactccgtcaaaatcaacggcaaaaaggtttctttcgacacccccttgggtgggggtgctcagctgagcacggtggtgccttacaccactctccaaacctcgatctatgcaaacttcgaaagcgcttatttgaaagccgcttcgtctatgagcatgaaaagggtcgatccagtttccccctttgggctctgcttcgaatccaacggcgttggaagctcccaagtggggcccaacgtgccggtcattgatctggtcctgcagagcgagatggtgaagtggagcatacacggaagaaactccatggtgcaggtgaacgacgatgttatgtgcttagggtttgttgatggaggtgagaatccgaggaaccctattgtgattggagggtatcaattggaggatgtgttggtgcagattgattttgatacttccatggtgggattcagtccttcgcttctgacgaagcatgctacttgctctcatttcaaaccctag

SEQ ID NO: 516 - DNA, 2077 bp, Glycine max
aaactattgtgctattacgttatgactgtatccgttactggcatgcagagctgaatatgatccaaaaagtgatttattggatcacgagttcatgctaaaagggaaatggtttcaacggaaggacgtggagataaaaaacagccgtggggatgttcttcaatgcagccattacatgcctatagtcagtcctgatggaaagcctctgccatgtgtgatatattgccatggaaacagtttttactctggatttctcgggatcaggaatctctggaggagagcatgtcactctaggttggaatgaaaaggatgatctgagggcagtggtcaactatctgcgggcagatggaaatgtctctctgattggcttatggggacgctcaatgggtgctgtgactagccttatgtatggagctgaggatccttcaatcgcaggaatggttttagacagtcccttctctgatttggttgatttaatgatggaacttgtagatacatatagagtccgtctgccaaaattcacagtgaagtttgcaattcaatacatgcgaaaaacaatccagaagaaagcaaaatttgacataacagacttgaacaccgttaaggtagcaaaatcttgttttgttcctgctctagtagggcatgccattgatgatgattttattcgtcctcatcactcagatcgtatacttgaggcttacatgggggacaaaaatataattaaatttgagggagatcacaactcttcgcgtcctcagtattattttgattccgtaaacatattttttcacaatgttttacaacctcctgaagatgagcttggggaatcattttttgacattatgaatgattactttggtaaggatgtttggagatctgtgcatgaatttgactttggcaatgaaccatcattccaaaacaaagaaacatcaacaagcagtactgtggaagacattaagcacgtccgttcaaaaaaaccaatgagtaggatggaggttccatcacatatttcttcaaaagatgcacatctcgactgtgaggcacagaaatgtgatgatctttcctcatcatcttctacaatgattagttttgaattatcaaatggtcgtctctatagtcccctcgttccaaccgatctagatgatgaccactttgtggaatttcaacttgatgactttacaggctgtccatctagtgcaaagaaagaacaaaaaatgttcacggaagcagtgatagattcattgaaagaccgggaaatacgaattccagaggtagaacaaccacctgttaggagtgctagtagtaccatgtctatagagccatcggataagaatgactcacatgcttctaattcacatgagatttccaaacctgtggagacagaatcttctttactcaaccacagtgataaaacaatttccacttcatctgatgcattggagcccttgaaaactgagtcaaattccatttcagtgattccaagtcctgtaacaagtctttcatcaagcaaaataccatcatcaccactaccaccattggacacttcatcggtcaccgagtctggcgatacagaaagtgcttctactggtaatgatagttctgctagcttacaaagttcatcagacactgacatttcacacaatacaaaagccacattaactgttattaagaatccaacaggtcatgtcttgaacggcttactgcgacgttgggatttcaagtttttcagaaacagtcagaatcgataagattagagagtcatggcttttgtaactacaaaatatactacattagtttgtaaaatgccccacaaaagaaataggttgcttgtacttaggttctgtatctttagattatcatctagcattcatcttatattctttcactgtaagagagagttgttgtgtttttaccccgtcgaactagaatttctggaagtccccattatttggccatgcttatgcatgatttattgattttttccttgaatgttttttcatttttcttatcgaagattggtgtaattgtattcaactactgtgggggggctttcacgttctttttgttacgcctgacttct

SEQ ID NO: 517 - DNA, 1299 bp, Glycine max
atggcacagattttggctccctctacgcaatggcagatgagaatctcaaaatcctctcccaatgcaactcccattacatcaaacatgtggagttctttattgtggaaacaaaataagaaagtttcacctaccagttctgctaaatttagagtgctggcaattaagtctgacaatagcaccatcaacaggctcgagggtctacttaatttggatatcactccattcactgacaagataattgctgagtacatttggattggggggacaggaattgatgtgcgcagtaaatcaagaacaatatcaaagcctgttgaagatccctctgagctccctaaatggaactatgatggatctagcactggacaggcacctggtgatgatagtgaagtaatcctatatcctcaagcaattttcaaagatcctttccgtggcggtaacaatattttggtcatttgcgattcttacaccccacaaggtgagcctatccctacaaacaagagacacagagctgctgaaattttcagtaacccaaaggtccaagctgaagttccatggtatggaatagaacaagagtacaccttacttcaaacaaatgtgaaatggccattaggatggccggttggtggctatcccggtcctcagggtccttattattgcagtgctggggcagataagtcatttggacgtgacatatctgatgctcattacaaggcttgcttatatgctggaattaacatcagtggcaccaatggggaggttatgcctgggcagtgggagtaccaagttggtcctagtgtaggtattgaggctggtgatcatatctgggcttcaaggtacatcctcgagagaattactgagcaagctggtgttgtgctctctcttgatccaaaaccaatagagggtgactggaatggagcaggatgccacaccaattacagtacaaagagcatgagggaagatggaggctttgaggtaataaagaaggcaattttgaatctatcgctacgccacaaggatcacatcagtgcatatggagaaggaaatgagagaaggttgacaggaaagcatgagacagcaagcattaacacattttcttggggagtggctaaccgtggttgctcaatccgtgtgggaagagacacagagaagaatggcaaaggttacttggaagacaggcgaccggcttcaaacatggatccatatgttgtgacatcattacttgcagagactacactattgtgggagccaactctggaggctgaagctcttgcagctcagaagttagcattgaaggtctaa

SEQ ID NO: 518 - DNA, 2871 bp, Glycine max
ccacgatgaccccatcagcgatcacgttcagttgttgctgaatacgagaaagagaaagagatctaaacaacgccgtttcttccattctccgccaaacatccaacaacccctaacaaacgataccaccaaccactacacaattccaattcaattagggtttccaatttccaattttcatggaacccctgtctctccctcctctcccagtcatggacgacgccgaagacccttcctccatttgggacttctcttacctcctcgacttcgacctcgacgaccaagatattattattaataacaacaactctctccctcttcccttaaacgaccaccccgctccaagcgagatccctcaaaacgacagggtccgaaagcgcgacccgaggctcacatgctccaacttcctcgcgggtcgggtcccctgcgcctgccccgaactcgacgcgatactcgaggacgagggtttgcctggcaagaaacgcgcccgcaccgcgcgtgcatctgcatccgctcgctgccaggtccctgcctgcgaggtcgatatctcagagctgaaagggtatcaccgccgacacagggtttgcttgcgctgcgctaatgccgccaccgttatgctcaacggcgaggccaagagatactgccaacagtgtggaaagtttcacgttttgtcggatttcgacgagggtaaacggagctgtagaaggaagttagagcggcataacaccagaaggagaagaaagcctacggcggattctggaggggctactcatagtgaactacttcaacctgttgccgaaaacgaggaaaacaattatgatgtggaagctggaaaagaatgctcactggctgagtatgaatcgtacagattgttcgaatttgagtaccgatatcaacgacgttggagtgtctctggatcttgaagatgaaccggctcccattccgagctcggctcctgaagcccagaatattaatagtgatagtgttgtgtctttggctgtttctggtgaaacgcgagtgaatagtgggaacacttccaattcgccttcttattgtgacaataagagtgcctattcgtctatgtgccaaacaggtcggatttcttttaagctttatgattggaatcctgcggaatttcctagaaggctacgacatcaaatattccaatggttggcaagtatgcctgtggagttggagggatatatccgccctgggtgtacgatcctgacaatttttattgcaatgcctaacatcatgtggataaatttactgaaagaccctttggagtatgtgcatgatattgttgctcctggaaagatgctatctggaagaggcactgcactagttcatctgaatgacatgatcttccgtgttatgaaagatggaacttctgtgacgaatgtcaaggtaaacatgcatgcaccgaagcttcactatgttcatcccacatactttgaggctggcaaacctatggagtttgttgcttgtggaagtaacttactgcagcctaagtttcggcttcttgtatcgttttctggaaagtatctgaaatgtgagtattgtgtgccttctccacatagctggactgaagacaacatttcttgtgcttttgacaatcagttatacaagatatatgttcctcatacagaggaaagtctctttgggcctgcatttattgaggtggagaatgaatctggtttatcaaactttattcctgtactcattggggataaaaaaatttgtactgaaatgaagacactgcaacaaaaattagatgtatctctcctttctaaacaatttcggtctgcatctggtggttctatctgtagctcatgcgaaacttttgcacttagtcacacatcatcatcagacttacttgtagatatagcatggttgcttaaggacaccacttcagaaaattttgacagagtgatgacagcttcacaaattcaaagatattgccatttgttggactttctgatatgcaatgattcaacaatcattttgggaaaaatattaccaaatttgataatcttgacagaaagcatgaaatccaatgttgtaattaataggacaagtgatgttgacataatgcaactcctgaatcacatacataatgctagaaatgccgtatatcagaaacatccgaaaagtgaaagtataattgtgcactctgaaatgaaaggctttatacttgctcagggctgctcccaagataacaagctatcagttgcaattaacagccagggtatccagtcgagagcagatgagaagtggggagtactgaaagtgaaaagtccaacttctaatgagaaaatggaaagaataccacttttgaagagggatattataatgagtatggaagagttgcctgaaagatacgggcgtcgatgtttgggcaggggattcttgacctttcggccagctatttttgtgttggtttcggttgctgtatgtcttggggtatgtgttgccgtccttcatcctggtagggttagtgagttagcagtatccgttagaaggtgtttgtttaactattagtatttttttgtacttgtcttcgagttggtacatatttgttgtaacactaaataaactggtgttattgggatgattaggtagtttattacattggaaagcttaatccaaggttgctaatttgtgcattaccaattttatcggatgtccagagggacttgcagttgcaggtgctgtgactgcaacgagtctgatcattaatagttaaaatttgtaattcatgttaccattattacaattgggtgtttatgctagatctctctctagaaatgtgtaaagtaagaaactttcatggaagtgtgtattaggcctataatcctaactcaactccaagaa

SEQ ID NO: 519 - DNA, 2577 bp, Glycine max
cgcttccagctcatgccattactcagtttgatgttgtcgggattttctacattgcacaatctatacggtgctgtttggagcttctctttctttcccaccaactttcctaggaatcaaacaccctggactcgttgattctccatatagttggaactctgctttgagctttgaagaagaaaatgttcgggttctctcgcaggcacatgaaacttggcagtagattgaaggtccaactttctgacaccaccctgggaactagaagtcccatcaggcaccataagcgaaatgtaaactccaatggtgatagagttacagggacaagtggtcattctgagaaaatgctttcatctgctgcacctgatatgcatacttgtacatcaggtagctccgagaactggatggtgttgtcaatttcaggggataagcctactcctagatcctatcatgctgcagctgtcattcaaaataagatgatagtggttggtggtgaatccgggagtggattgttagacgacgtgcaggtgctaaattttgacagattttcgtggaccatggcatcgtctaagctttacttgtcaccaagcagtcttccactaaagcttccagcttgcaaggggcattgtttggtttcttgggggggaaaggcactcctcattggagggaaaacagacccagcaagtgacaaaatttctgtatgggcatttgatacagatacagagtgctggtcacccatggaagcaaagggagacataccggttgctcgcagtggtcacactgttgttatggctaactctgttttaatattgtttggaggagaagatgtaaaaaggaggaaactgaatgatctacatatgtttgatctcaaatccttgtcatggcttccacttcactacacgggagcagcaccttgtcctagattcaaccatgtggcagctctttatgatggtaaaattctatttatatttggaggagcatcaaaatccaggaccttgaatgacttgtattcacttgactttgaaacaatggcatggtcaagaataaaaatacgtggtttccatccatcaccaagagctggttgctgtggtgttttatgtggcactaaatggtatattacaggaggtggaagcaagaaaaaacgacatggggagactttggtatatgatgttgtaaaaagtgaatggtctgtggcaataacatcacctccatcttctattactaccaaccagggttttagcctaacactcgtgcaacacaaggataaagacttccttgttgcatttgggggatccaaaaaagagccatcaaatcaggtggaagtgttgataacagaaaaaaatgaattcgtcctgagaagacgaccgacttctaccaaagatccaagatctatactacttgattcattatctgctggattggcttctcaacttaaaaatgactcttcacaacgtttgattaactctgttgctcgacaaaatcttgcatccgtaattgaacatagttctgaaaggaaatctctgtcagaatcccttcttgtagaatattccgattctctccctaccaacatctcccttcgcaggcaatttgatcatgatgaaggatacaatgcagatgtcaggattggcaaacattcggaagataaaagttctttgactcgggcagctgatcatagaacaaatcaaaatgatcctcgaaatcacatgagcagaaatggagccaagaccaacatggaggaacaggtgttggtatctggaagttcaaatcagcaaaacctcggttttggaaaccccctgttagaaagtgatgatgtgtcattccctgataacagtaaattaggatcactgtccactgattcaaacatccatcattattatgaaactaaagtggcttccttaatgagaaaatttggcattctggagggacaattgtcagcggcattagcaagcagagaagctgctgagaaaagcttagcatctgccttcaaaagcaggcaggagatggagagaaaattggctgacacactgaaggagatggaattactgagagagaagctggtcaatgcagagttagctcaagaagaagctaacaacctatccaacatggtccatgctgacaatgtaaggcttgagcatgatgtggcattcctcaaggctgttttagatgatactcaaaaggaattgcactcaaccagaggggttcttgcggcagaaagaaccagggcactccaattacaggttgaagttttccatctcaaacagagacttcaatcaatggaaaatcgagtccctactcccaggaaaccttttcaagtgtagtgttttgaaatgtcaaataatgtcatgccaatgaatttcagcataaatgatgaaacaatgcatgaggacgcagtctattaaggaaagggcaacttgagggtggcgaagaagacttggatgggccaactccaaagaaaaagaagcacaattaatgaaacagcccttcggcggctaagaaaaatggatctgtacatatgtaatgtctattaataataaattaacatttcctcaaaatgaaaaataaattgacataaagttataagaa

SEQ ID NO: 520 - DNA, 1613 bp, Glycine max
aacactgtggagaccgaaaggtcggaacataaggcggggaagagttagtttcttctctcttcgatggaaggcggggaagaggttctcccttcggccactgccacctccgccgccaccggcaatcccaccgcttcgcctcctccgctcgctgatcttgtcggtgctcccgatctcgctgctgcctcggacgacgtcgttacccaacctgaaattcacgcgctgatttcagacgaagagcacgatcacgagcatgaacatgacgatgacctcgagcacgagcacgatcagcatgagcatgaccaccaccacgaggaccgcgatgatcacgccgctgtggccgctgtctccttggaagatctcaaactcaagatcattaagcaggcggagtattatttcagcgatgaaaacctgcctactgataagtatctgttgggtttcgtcaagaggaacaaggaagggtttgttcctgtatcagtaattgcttcttttagaaaaataaagaagctcacgcgagaccatgcatttattgttgctgcactgaaggagtcttcactgcttgttgttagtggtgatgggagaagggtcaagcggctcaatccacttcgtttcaatgaatctagagatcataagttatatactgttttggtagagaatttgccagaggatcattcaaagaagaacattcaacaaatattccatgaagctggaaatataaagaggataaccattcatgacccacattctacttcagagtctgcaaaacaacataacaagcaagaaatgctaattagtaataagttacacgctcttgtggaatatgagactatggaggctgctgagaaagcagggaagtatggacacaaaaaacaagcttggaaaggacatcattctgagaagaatagctcaaggcctgaacaaacaggagatgaggagaatcatggctctaatgatcatcatgaagatacccatgaggaagaagatggggatcatttgtcaaaggataagggtgggcagaggtatagaaatcaaggaagatcaagaaaacataaatatcgtgctggaaatggaatgggccatggaagtgcaccatcaactcatgctgctgaagcatcaaagtcacctcctggacccagaatgccagatggaacacgtggcttcgcagttggacgaggtcggcctcctgtccctgcttcgaattagcaagatttgacacaacacgagggattgtatttagcagtattatgtggtccgatgttttagtgatggtactagttttaatctgggtccctatgcgtgttcggttgagtcaacatgggtttgttggactgttaaattatgcattcaatctttggaagcgagtgttggtggtgaagtacatgcccattttaagattattaggctgggaaacatagaactgtttttgttgtggtaatcctcaccttacgaggattctgtgtaacaaaatcatatcgagaaatttgttaatggggatgaaagaaagctgtgtttgataccaattgaaaatttctaggttgacagtataatggtctagttaactatgtacccattttttttcttctcaagataagaataagaataattataatataggc

SEQ ID NO: 521 - DNA, 1318 bp, Glycine max
atcctctcgtgcacttaactcttacatatatatatacacacacacaatagttaatttgttgttgcttcaattcgtttcttgcgtcaaattaagtcatctggggaggctcataatgaatatagggttagtggtaatagtggctgtggtattgtggagtggggttgcagctgcacaagcacaacgagtaccttgctactttatttttggagactcttcggcagataatgggaacaacaaccagctttggtcaaatgcaagagctaattaccttccttatgggattgactcctctgttggcccaactggaaggttttccaatgggaaaactactgttgatgtaatcgctgagcttttggggttggccggtttcatacgtccctatgcaagtgctggagcccgagacatattttacggagtcaattatgcttcagcagcttccggaattagagacgaaactggacaacaattgggaagccgtatcagtcttagagggcaggtgcaaaaccacataaggacggcgtaccagatgttaaattcactgggagatgtgaacagaactttaacttacctgggcaggtgcatttattcaattggagtgggtggcgatgattatcttaacaactatttcatgcctcaattctatcccaccagcaggcagtacacaccagagcagtatgctaatcttcttctccaatcatatgctcaactactcgaggttctgtacaactatggggcaaggaaaatggtattatttgggattagtccgataggttgcaccccttatgcattggctcaaagcagcccagatggtagaacatgtgtggaaagactgaattctgcaacccaattattcaacaccggattgagatctcttgttgatcaactcaacaaccggattccgaatgcaagattcatctatgtaaacgtttatggtatcatgcaaaatatcataagcaacccatcgtcctttggtgtcagagtcacaaatgttgggtgctgtagggtagcaagcaacaacggtcaaagtacatgtgtgcccctgcaaaccccatgcttgaacaggaacgagtacctgtattgggatgcatctaatccaacagagaccgccaatactatcattgctaggagagcttacaatgctcaatctacatcggatgctttccctattgatattaatcgcttagctcagatctaaatagggtctagtagtggcaataagctctagtagttgcaataagcggtgccataataacagtgactgactgtaatgtgtaatttttggagaagaaaatgatattttttaattgagtttaatgtt

SEQ ID NO: 522 - DNA, 1794 bp, Glycine max
atggattcttcaaactccaatggagcatcacagaggctcctggacttggctcaacggctccgcctgtacaaacccccaccattccctgaagacatcttggatcagatcatggaagagaagggagataaggttgtctcagaagtgagttacacgaaatcagccaccccaattgctcaaaacacagcaaaaatcggatacaagagagctgctgttttgatctgcatctttgaaggggatgctggggatctgagagtgatactcactaagcgctcttccaagctttccacttactctggtcaagtggccttgcctggtgggaaagcggaggagggggataaggatgatggggacactgcaaaaagagaggcaatggaggaaattgggttggatcctgaacttgtcgatgttgttactgttcttgaaccatttttctctaagtacctcatgagagtggttcctgtcattggcattcttcatgacaaaaaagcgttcaaacctgttctgaatcctgctgaagtagaagctgtatttgatgcacctttagaaatgtttcttaaggatgaaaaaaggagtcaaaagaagatgcagtgcatgggagagaattatctgatacatttgtttgactatgaaatcgaacataaaaaattccttatatggggtttgactgctgggatcttgataagggctgcatcagttgtgtaccaacgacctccagccttcatggagcagaatcctaaattcaagcttcctcgggatttaactattagagatataaggggagaagtgagaaacgtgaagtggtgcaacaagggaatgggttcgaacagtacggagacaggaggtattcataattcgccctcttcctctaatgatctcatcaccaaatcaaaactcaccgttttgaagaagaataagagagcagcagttctgatctgcgtcttcgaaggcggcgatgggaatctgcgagtatttctcacccagcgggcttcctctctctcaacccactccggtgaggtttctttgccaggtggcaagagagaagaaggtgatgctgacgatgtgcaaactgcgctgagagaggctaaggaggaaattggcttggacccttctcttgtttcttatggtgttacaataatacccgtggtaggagtactgtccgacaaagatgcattttctccaattttaaattcaactgaagttgaagcaatatttgatgttccattggagatgttcctcaagaacgataacagaagagccgaggaaagagaatggatgggggagaaacatcttgtacattattttgattatgaggatgggaataacaagtatgtgatatgggctataactgctgcaatcttgattagggcggctactcttttacttcagcgaccacctgcttttctagagcagagacctaaaatatggggaggaatgactgaaaatggcatatgataatactaggaggagttccaaataatgattttgtcttttaagtttgtataataatttaacacttgaagctgcattttttagaaatgaagcatatatttgcttctgcgttagattcaatgggatctacattagaaggaatgaagattaacaatctcacatttagtgtgtttggaaacttattaataagattcatatgttaagaaaattgcttcaaaatcagaaaaagacacagaagctactgggagttgtttctgccggatggtgtaaagtttttgctaaagagaatcccaaacatgtggttactgtgtgtttggaaacccattttatacttgcttcattcag

SEQ ID NO: 523 - DNA, 1200 bp, Glycine max
aatggagaagattcaaacagcccaaaagcataattataaacatgaaaagcaattaacgggaaacaacaaaaggcagggatgacaaaaatgtaattagtagggaggggatgcgtaggacgcgtagccatcggtggtgcgtagagggaaagctataaagcctaaaaataaggtaaagtggataagaattggttaatatttatttaattgtttaattaattaatcaatagtatagtatgtgcggtagctacgccacgtgtcctaccgaaagcttttggtgatggctttgaagaagtgtgtgagtgtcagtcatgcctataggctatagttcagttgagagagagaaagcatgaaaatttgtagtgggttttggttttggttttggagttgggtttataatcttcaatcttgtttgggagagagagagagagagagagatgtacatagcttccatgggaaggtctttcaaggactccttgaaactgcttgaagctgatattcaccatgccaataccctggcgtcagattttccaagggaatatgatgggacctgccttcagatgagaatgtcatacagtccagcagcacacctgtttctcttttttgtgcaatggacagactgcaatcttgctggagcccttggactgttaagaatcctaatatacaaagtgtatgtggatgggacaactaccatgtctacccttgaaagaaaagcaagtattagggaattctatgcaatcatatatccctctttagtgcaactgcaagaaagtgtggcagatacagaggataaaaaacagaaggctgtatgcatggagaggtatcgcaaaagagatgatgaggagcacagacagccttcagacatagacattgaaagagaagaagaatgtggaatatgcatggagatgaatagtaagattgtgttgcctgactgcaaccatgtcatgtgcctgacatgttaccatgaatggctcttgatgcattgtctgcccgtgtgttgatggtcaatctgccaatctgccattatgatgttaactggttatgttatgctaagcaactcaatatcagctattcttttcaatagaaggccataacaacttaaatctagccatgcactggaactgcttttagatcttgtatggtttgtccaaacctgtttcaatttgcttggtgtgacatatgactttctctcattagttctct

SEQ ID NO: 524 - DNA, 342 bp, Glycine max
atggctaatgtgtcccttctccttttccttttgttcttgtctctctcatcaggagggaatttgatcatggctaatgggcagaaaacttggtgtgtggcaaagccttcatcagatcaagcaacccttttggccaacctcaattatgcctgttctcaagttgattgcaggattcttcagaaaggatgcccctgctcttaccctgacaatctcatgaaccatgcttccatagccatgaatctctattaccaatccaggggaaaaaaccactggaattgtgatttcagggcctctggaatcgttgttgtcactgatccaagttatggtaactgcatttatgcatag

SEQ ID NO: 525 - DNA, 2550 bp, Glycine max
accttgcagaaaattgaccatgcaagcatagtgaaaggacttaagccttttaaggcatttcttttgctcaacttcaatttctctagctactagtttagttcagtacttcagcatatgtgaaatctgaaatgaaatgagaagaacaatgtcaaaggtatcatcagcatgcttcattttctttgcttttgtagttgtagcagcacttcatgttgaatgccgttctcttcggcctagtgtttctgatggagttgatgcaattcaacctcaagagtcttatctacaactcaataaagaccaaagggttgttgttgagtcttcttctgatgatgatgagcatttctgtaagcaaatgtacgggttcttgccatgttccaataacatacttggccatctcttcctcattttggtttatgagtacttgttgttccatggagaatcatatttggctgctgggggtgagcaaatcttcaagattcttggccctggtgtttttggtgctagtgcctttgatattcttggtgctcttcctgagtcattaattcttgttgttactggactttccagcgataaggagagtgcacaagagtatgcttccactggcgttggtttgttggctggatcatccattatgcttctgacagtagtgtggggaacttgtgttatcattggcaagcaaaagttgaaaaatgaccctgactcttttggcacaaattcgtcaaatggaggaataaaagaatcactaactggttatggtatcactatggatgtagagactagaaagatggcaagaatcatggttttctcagttataccactcctcataatgcagattcccaatttgttcaacttctcttctacaccacgcaatgtgaccttgatggtttctcttacagttgctgttgcttttcttatctcatacttcatttaccaggtctttaaacctcagatagagaaaacaagactggagtatattaaacatgatgacttaatattaagaatttttcaacgtgttgaaaaacaaactctgcaaaagatcctcaccgacgatgggactcccaatgtagctgcaataagtgggttgtatcatgaaattagtcaaagtgggggcaaggatttgttagcttctgaagtgaaagagctgttgtttgggaacaaattaaatgacacaaatatcaaagaggaacaaataactgacatgttaaaagtttttgaccgaaatggtgaccaaattataaccaaggaagagtttgtcactggcttaacagaatacattaaccaatcaaagcatgctctggatagacaatacctccccaaagaatctctcaacaaaatgtatcagacttttatcaagccatggattgaacacgtgagaaaacaacgcgaattgaagggacatcttatatctgaagtcttgaagcatgctcagaatgatatggttggcaggctgcgccaagatgatggcagacctgacaaaactgctatcagaaggttgtttgaggaaattgatgtcaacagggataaccacatttcaagatctgaattggaaaaaatagtcaaggacatacattttggcaaggtcgtagaaactgaggaggcagttacaaaacttgttcaagatcttgatctcaacagagacaatgaaattagcgagaccgagtttgttgaaggttttacaaaatggatggactcgaattccagccaagctgctaactcaaaatcttcgtctcacgaaattcatcaaacctgggaagatgttgaaaaggtgatggaagagaatcaaaccaaaggagcatctgcatggttgacagctatagcatatgtggtgttgggagttactatactggctcttcttgcagaacccttaatagcaagtgtccaaaaattctctgaagaagcaggaatttcatcatttttcatctcattcattttagtccccctggctacaaattttagagaagcaacctcagcaatcaaagaagctagccataaaaagagcagcaatacttctcagacaatgtatgagatttatggagcagtgttcatgaacaacattcttggctttgtggtgatctctatacttatatatatgcgtgagatcacttgggaattctcagctgatgtgctagttgtggcaatagtttgtgctgtaatgggccttactgctagttttcgacccacgtttcctctttggacatctttccctgcatacctcatgtacctaatagcattgcttttggtctttgtcctcaaagatgttctcaattatgtttaatgacctggtgggtataacaaactatggatgtggactatgttgaatcttgtgtggccgttgatgattctaatggggtcgttgatgccttgatggaaaacgaatttagatgtacactgaatgcaaggaaaagtcaagagtatggattacgccagagaagttagtaacacacttgattcaacattataaaatcatgagtcgagctcattggataagaaatgagacctatatttattttttttgtaattttcaaaaaaaaaataaatcatccataataaaga

SEQ ID NO: 526 - DNA, 1490 bp, Glycine max
gaagaaaaaaaaaaacattttcatcatcttcttcttctttttcatcaatcatcaccagtggttcttttccttctgagaagatcgaattgtgttttgcaaaaatgggagttccagagaaagaccctctttcccaattgagtttgcctcctggttttcggttttaccccaccgacgaggagcttctcgttcagtatctgtgccgcaaggtcgctggccaccatttctctcttccaatcattgccgaaattgacttgtacaagttcgacccatgggttcttccaagtaaagcgattttcggtgaaaaagagtggtactttttcagccccagagacaggaaatacccgaacgggtctcgacccaacagagtagctgggtcgggttattggaaagccaccggaaccgacaagatcatcaccaccgaaggtagaaaagttggcataaaaaaagccctcgttttctacgttggcaaagcccccaagggcaccaaaaccaattggatcatgcacgagtatcgcctcctcgactcttcccgaaagaacactggcaccaagcttgatgattgggttctgtgtcgtatatacaagaagaactcgagtgcacagaagacggcgcaaaacggcgtggttccgagcaacgagcacactcaatacagcaacggttcctcttcttcttcttcgtcccagctggaggacgttctggaatctctgccatcgattgatgaaaggtgtttcgcgatgccacgcgtcaacacgctgcaacaacaacagcaccacgaggagaaggtcaatgttcagaacttgggtgcagggggtttaatggattggaccaacccttcggttctgaattcggtcgccgatttcgcttcggggaataatcaagtggtacaggaccagactcaggggatggtgaactacaactgcaatgacctttatgtccctacgttatgccacttggactcatcggttccgttaaagatggaggaagaggtgcaaagcggcgtgagaaaccaacgggtcgggaataataattcgtggtttcttcagaatgatttcacacaggggtttcagaattcggttgacacgtgtgggtttaaatacccggttcagccggtcgggttcgggttcagaaattgaaccggctgatggattaataatagtaatgtttaaatcgggtttatttggtgtaaataggtggggattctttgggcttaactcgtgggggttttagattcctttttagaaaagggaagaagaaggtgcaaattttggtcctcattttcggctaaagatggagggtatactacaaacgttcaatgaatcaatccacgagataaagcaatgatggaaccatttaatttgttaggacgtagttttcggccatacaagcccttacttagccacatgaatcacatttgtacttaaaatgaagaactagaaaattgtttgctatatgttaggtttcgttaattaattaattccaatctggttatt

SEQ ID NO: 527 - DNA, 1283 bp, Glycine max
gtgaatttcctcatatttctctaagacacagaatatttaagaatggagttcaccaaaacaagttccctcctaatattcttgctagtgtttgtctcaagcttgatccatgctaaggcataccaaaatctatactgtggcagaggaaccagatgctatggaaagtacatcacatgtcctgctgagtgccctaacagtgaaacaaacaatcctaagactaaggtttgccaaatcgagtgcaacaaacctacttgcaaggcagtctgcagaagtcgcaagccaaactgcaatgcaccaggatcaggatgctatgatccccgtttcattggtggagatggtagagtcttctacttccacggaaagaccaacgaacacttctccttagtctccgattccaaccttcaaatcaatgcacgcttcattggacacaggcctgaaggaagaagccgtgactacacatggatccaagcccttggaatcctcttcaactccaaaagcttctcacttgaggccaccaagacaccccagtggaatgatgaacttgaccacttcaaattcacctacaatgagaaccaagtagccctagctgaaggctctctctccacttggcacagtgaagaaaaagatataaaggtggagagagtggcaagcaagaacagtgtgatggttacagtgaaggatgtggctgaaatattggtgaatgttgtgccaataaccaaagaggatgacagaattcacaactaccaagtgccttctgatgactgttttgctcacttggaagttcagttcagattctttgctttgtcccaaaaagttgatggtgtacttggaaggacttataggttggattttgagaacccagcaaagcctggtgtggctatgcctgttgttggaggagaagacaagtacaggactaactcattgctctctcctgattgtgtttcttgtgtgttctcacaggaaagttctgctgagaaagagaccatggaatatggcacccttgattgcaccaagttttcaaatgggttgggaatcgtttgcaggaagtgaaaactgtttttttttttatccttaatttatgttgtgttgggtatgtttagaaacaataatccaatgcgtggttgaggtgaaaaatctgaaacctcgtttttgggaataatgattctatatatgcacactagtttgcctttgttgtaattaagctcagtcgttcaatgtaacgtgagcttctgtattaatgtacttcttaactgctaagtatacaacatgtactcacttttcctttc

SEQ ID NO: 528 - DNA, 612 bp, Glycine max
atggctgtcaaagtttatattgtgtactactccatgtatgggcatgttgagaaactagcagaagaaataaagaaaggggcttcctctgtggaaggtgttgaggccaagttatggcaggtacctgagacactgctggatgaggtgcttggtaagatgagtgcaccacccaagagtgacgtaccagtcattacccccaatgaactatccgaggctgatggctttgtattcggcttcccaacaaggtttggaatgatggctgctcagtttaaagcctttctagatgctactggaggcttatggagagcacaacagcttgcaggcaagcctgctggcctcttctacagcaccggttcacaaggtggtggacaagagactacagcactcactgctatcactcaactggttcatcatggaatgatattcgttccaatcggttacacattcggtgccggcatgtttgagatggagaaagtgaaaggtggaagtccatatggtgctggaacttacgccggtgatggctcaagacagccaagtgagcttgagttacaacaagcattccaccaagggaagtacattgctggcatcacaaagaagctcaagcaagctgcataa

SEQ ID NO: 529 - DNA, 1323 bp, Glycine max
gcgtaaaagtaaaagagggaaagcaagaggtgcgggaagaagggagaaaggaaaggaaaggaaaagaagaaaacaagaagggtttggtagtttgtttgattatctacgggttgttatcatttccatccatttaattccccacaaccacgctcacctaagtttcaatttcaatcccttttctttttccgttacaaaataattcaaaattccctccctcatttacccttgtttgtgtaaagtagtagcagagtgagactaggtatcatcgatggcagggtacaagggcgatgacgaatacgattacctcttcaagctggttctcatcggcgattccggtgtcggcaagtccaacctgctttcgcgcttcacgaggaacgagttcaatttggagtccaagtccaccataggggttgagttcgccaccaagagcttggacatcgatgctaaggtcatcaaggctcagatttgggacaccgctggccaggaaaggattgaagttttgttgctctggtacggcgttatgttcaaggattgaagttttgttgctctggtaccgtgccattactagtgcttactaccgaggagctgttggtgccttacttgtctatgatgtcacacgccgtgctacatttgagaatgctgcaaggtggttgaaagagttgagagatcacacagaccccaacattgtggtcatgcttattggaaataagtcggatcttcgacaccttgttgctgtcccaacagaagatggaaaatcttttgcagagaaggaatctctctacttcatggagacttctgctttagaagcaacaaatgttgaaaatgcatttactgaggttctttctcagatataccgcatagtgagcaagagagcagttgaggccggcaacaatgccagttcttctgctgtcccgtccaaaggacagacaataaatgtgaaagacgattcctcagttttgaagaaaattggatgctgctcaaactagatgcatcatctatggcagttggtttttgtagactgtttcatcttgtaaatgcctacactggaatcgtgatatcatgtagaataaggctagtcttgcatattgttttgaatttacaatttacaagcatcatccatacataggattatgtttccgtgaaacggtcattctaaagacgtgcttgaaacaaataggtctacatcaaagttcatatagcttaagttttatttgaaggattttgatatttgctatgctctaattatggtgcagctagtaacaattcgaacgtctgctttaaaattgaagtttcaatgtatggagcttgtgtttagtttcgttg

SEQ ID NO: 530 - DNA, 2327 bp, Glycine max
ttcccttctcctttttaatcacacttccattcccatgcacaccccacacacatcctactaaaaaacattgcccttgttctttcaaagttaccaaacacaagtacacaacacaacagcaacatatggcgtctgaacaattggctcgcagagagaacaccaccaccgagaaggagattcacgttgagaaacacagggttcccaagatggccacccacttcgagcaccttgcggagcaagctaaagaatctgacatcaccgctgggaaggatactccgcagggtagcatagaagccttgcaagctggagagagggtcaaagatcatgcaggaaaagccatgggagatattggtggacgtgggaaagccagagagactcacgagctgggtgcacactttgaatccctggctgacaaagtaactgaccatgcagcagccaatgtagttggaaacaaagagagtcaaagagaagctcgtggtggtgttcgtgatgttgggaagttcgaaatgagaactgaagggggagaaaaaggaaacaaggatagaccagaactgaaaacacgaaccagagaggtaataggaagaacggagaaagaaagaggaagagaaagtggaggacaagtagtggcagagaaaggaagagaaacagaaactgcaaggggaagggttggtgctgaaaatgaaggtgcaagaacaaccgctgttataacttgcacgttggaaaaaggtggtggtactcagaaaccaataagagaagaagagagagagagtgaaagtgaaagatcagcgtgggaacagatttccaactacagtgatcaagccacacaaggtgtgaaggaaaagtacgagagagcaaagcaagcagcaagcgagacactgaacaccacaacacaaaccgcacaagagaaaagcgcacaggcaaagaatcttgcagcacaagcaaaggacgcaacgttagagaagggtcagcaaggctatgctgtgacaaaggacaccatttcaagtgcagcgaaaaccgcttcggagaaaactgcgccagtggcagagaaggccaaagactacactcttcaggctgcggagaaggccaagagtgcgggtggcacaacggcgagttacgtcggagagaaagcggtgcaggccaaggatgtcgccgtggagagtgggaagagtgcggctgggtatgctgccaaggtggctgctgatttgagggacaaggccaccgcggtggggtgggccgcggcccatttttcggcggaaaagacggtggaagggaccaaggccgccgcccatgttgtcgagggagcggccgggtatgccggacataaggccgcggagcttgcttcgatgtcggccggtgctgttaaagggctggctgcttctgctggtgagactgctaaggaatacaccgcaaagaagaaagaggaggcacagcgggaattggaggccaaaaaaccatctcaacctcaggaagctgaagagaggccatcagaaggaattggcgaaactgtgaggcagtatgcacaaaaaccaaagccaagtgaaagaaaccctcagaaggagggaaccggaagcatcgtgtttacagcaataggcgaaacagtaagcagtgccggtgagaaggtaaagaaaccgtttaaaaacactatgggaggagaaagtgaaggaggaggagggaaagaagaggggaagagtgtcattggtaaaagtttgaccagcattggtgagaagctgggtgatgcaaaacagagagaggagctgttagacaacgtcactggcaacatcaccgagggaggaggcgaggtgttgggagcagtaggtgaaaccgttgctgagattggacagaacatgatgaagccagcggagatagttcaggaacgcgctcacgttcgacaagcgggtggggtcttggatgccattggtgaaaccattgctgagattgctgaaacgactcgagtcatggtttctggagaggacgagagagtgctgaggcagagcgtggtgttggagactcgcgtaactggtcgtgccaagcatgaagaagggtcgcacggtgcttgagtctcttgagtgaacgctgtgttttttaaggtttatttctgttaatgtcatgtttagtctgtgtcaagtttcatgtttcgggtttgttgactttgttctatggaattgtaaccaataagaatctccttttttgagattatggaaaatagcaaaattgtgtttatgcctgtataatagtacgcaatgtgtgctttcatgtgatcgctgcatggaagcaaatatttaatttttgatgcactgtatgatcgctacaatattatctatcgagttatg

SEQ ID NO: 531 - DNA, 975 bp, Glycine max
atgggaagcaacttgaggtttttgagtctttgcctcttggcattgattgcatcaactcatgctcaacttcagcttggtttttatgctaacagttgcccaaaagcagagcaaattgttttgaaatttgttcatgaccatatccacaatgctccatcactagcagctgcattaataagaatgcactttcatgactgttttgtaaggggatgtgatgcatcagtccttctgaactcaacaaccaatcaggctgagaagaatgctcctccaaatctcacagtaagaggctttgacttcattgacagaataaagagccttgttgaagctgaatgccctggtgtggtctcttgtgctgatatcctcactttggctgccagagacactattgtagccacaggtggacctttttggaaagttccaactggtcgaagggatggggtcgtctctaacttgacggaagccagaaataacattcctgctccatcttccaactttaccaccctacaaacactctttgctaaccaaggacttgatttgaaggacttggtcctgctctctggtgctcacacaattggtatcgctcattgctcatcattatcaaaccggttgttcaatttcactggcaagggtgatcaagacccgtcactagatagtgaatatgctgcaaatttgaaagcattcaagtgcacagacctcaacaagttgaacaccacaaaaattgagatggaccctggaagtcgcaagacatttgatcttagctactatagtcacgttattaagagaaggggtctatttgagtcagatgctgcattattgactaactcagttacaaaggcacaaatcatccaattgcttgaagggtcagttgaaaatttctttgctgagtttgcaacctccatcgagaaaatgggaagaattaatgtgaagacagggacagaaggagagatcaggaagcattgtgcatttataaatagctaa

SEQ ID NO: 532 - DNA, 3937 bp, Glycine max
catttaaatccacccaccatacccatctttttttcaatctctgttatgttattacttcttctttttattattattagaatattactagtatttattattatttattttctagtcattggtgttttagctagatttgaccgttaacgaggaagttaacccctcgatcttctccaccaccaacagcatcactttttagggttttttcttatttaccaccaaagcttaggcccttgttgccctcttttaactctttttttttttttaaaaaaaaaagaataactttcatggttgttcaacaatttaggtgtttccccctttcatgaaaattgctaaacccttaagggtacatgtcaaatttcagtttttttttttttactgattcggtttcacagtgctttggggaattcagaataagcaatttgcgtaggttttgagcatagtggatgaacttttcagttccttccacttccccaaattcaaactttttttttttttttttatgaatttgcagcaagcagtgtggaagaaagattgttttttggtgtgaaagaagagattttattttctggggaagatgatagccgagaaacctagttgggttaggcatgagggcatgcaaattttctccattgatgttcaacccggagggctcaggttcgctactggtggtggtgaccacaaggttcgcatatggaatatgaagtctgttagtactgacttagaaaatgatgattcttctcaaaggcttcttgcaactctacgggatcactttgggtctgtcaactgtgttaggtgggctaagcatggaaggtatgttgcatcaggctctgatgatcaggtgatattaattcatgagagaaagcctggttcaggaaccactgaatttggcagtggagagccaccagatattgaaaactggaaagttgcaatgactttgagagggcacactgcagatgtggtggatcttaactggtctccggatgattctgcattggctagtgggagtttggacaacactatccatgtatggaatatgagcaatggcatttgcactgctgtcctaaggggccactccagcttggttaagggagttgcttgggatcctattggctcctttatagcaagtcaatctgatgataaaactgtaattatttggcgaactagtgattggagtcttgctcataggacagatggtcactgggcaaaatcacttggatcaacctttttcaggcgtcttggttggtctccttgtggtcattttatcaccactactcatggtttccagaagcctaggcattctgcccctgtgctagagagaggggaatggtctgcaacatttgattttctaggacacaatgctccaattattgtggttaagttcaaccattctatgttcagaagaaatttgactaatgctcaggaagtgaagtctgtacctgttgggtggaccaatggtgcttccaagactggaagtaaagaaccacagccttataatgttattgcaattggaagtcaggatcgaactataactgtttggactactgcaagtcctcgtcctctatttgtggctaagcatttttgtactcaaagtgttgtggatttgtcctggagccctgatggatattcactttttgcatgttccttggatggatctgtggctacatttcattttgaggtaaaagaacttggtcagagattaggtgatgctgagctagatgagttgaagagaagtcgttatggtgatgtgaaaggtcgtaaagcaaacttggctgaaagtccagcacaattactgctagaagctgcttctgccaagcaaacacctagcaaaaaagtggtttctgatgttcaacaaaaccaatctaaggcaaaggcttatgttgatgtggcagttactgcaaagaatgctgagcttcaaaatgatgatggcaagaaaagtggaggtccagttggtgatgtgtcaaacaaagctgcaacctctggccggatttctagtcctgttaagcaaagagaatatagacgacctgatgggcgtagaagaattattccagaagcagtaggagtgcctgttcagcaggaaaacatttctggtgcacttcagcaagcactcaattttcgtatagtttcttctgatcacagaaaggatattgaaagagctgtatccaatgaagatggtgcaagagtatgcaccttgggaggagcacatggcagaaatactgatataaaagagcgttctggggttactgctagggccacaatttcggagagcctagtgattgagaaggttccagcttctgctggtgatggaagcgtcaatgttgagcagtcaagcaatttgatgtcttccagttctttagctgcttgtagtggtacactttccattagagtatttgacaagaaaagtggagaagattcttctcctattcttttagaagcacgcccaagagaacatgctgtaaatgacattgtagggctgggaaatacatccataatgaaagaaacagaaattgtgtgctcaaagggtcctcatacactttggtctgataggatatcaggaaaagtcactgttttagctggcaatggaaatttttgggccgttgggtgtgacgacggatgtctgcagatttacacgaagtgtgggagacgagcaatgcctaccatgatgatgggttctgcagctacatttgtagactgtgatgaatgctggacattactgctggtgacaagaaaaggatccctgtacttgtgggatttattcaaccgaacctgtcttcttcaagattcgttgacttctctagttgcttcaagtcctaactcgtctggaactattaaagttatatctgtgaaactatcaaaatcgggttcccctcttgttgtgttggctactcgccatgctttcttatttgacatgaatgtcaagtgttggctgagggttgcagatgatttctttcctgcatcaaatttttccagctcatggagtttgggttcgattcaaagcggtgagctggcagcactgcaggttgatctcagaaaatatttggctcggaagccaggttggactagagttactgatgatggagtgcagacacgtgctcatttggaaacgcaattggcttcttccttggctttgggatcccctaatgaatatcgccaatgcctattgtcatacgtacgctttcttgcaagagaagcagatgaatctcgtttacgtgaagtgtgtgagagtttccttggacctccaactgggatggttgaggaaacatcttcagattcaaagaacttagcatgggatcctatggtgcttggaatgaggaagcacaagcttcttagggaagacattcttccatccatggcatcaaacagaaaagtccagagattacttaatgaattcatggatcttttatccgaatatgagatcattgatgctaatcaagagcaatcaaaccccacagtaccaaattcatccttgccagaaaccaatccaattgagagcagttcactagcaacagatcaggagcacactgctccaccaaaattggatcacaataccccactggaaaaagagcaaataaatttccctccagcactcacagatgaagctagtgcagatacccctatgacagatcaagctaaccaggatgcacaagttaaggaaagtgtctaacttgtgcatcttacaatagtaggcagtattaagggtagaagtgtatcaacaaaggatgttctagtggcatggatgaatccaatatcacgtttttcttttatgatgtttgtacccccataggaaacaatgctgatagctctcctttaaagtttatctcactaacacacacttcttcacaggtatcacaagttctatgttacatttgtagcttctcccatcaacttggagcttgtttttttgtaaaatgtctagtaaaggaaattagaatttctttct

SEQ ID NO: 533 - DNA, 1707 bp, Glycine max
atgaatcactcatacgcgaatcaatcggctcaagaagttaatatagttacagaggacacaagaagatctgcaaattataaacccaacatttggaaatacgattttctgcagtcacttgacagtaaatatgatgaggaagaatttgttatgcagttgaacaagcgggtgacggaagtaaagggtctttttgttcaagaggcaagcgttttgcaaaaactagagttggctgattggatccaaaagctaggccttgccaactactttcaaaaggatatcaacgagtttctcgaatctatacttgtctatgtcaaaaacagcaacattaatcctagcatagaacatagtttacatgtatctgcactatgcttcaggcttttaagacaacatggatatccagttttgcctgatactttaagcaactttttagatgaaaaaggtaaagtgataaggaaaagctcatatgtttgctatggtaaagatgttgtggagcttcttgaggcctcacatttgagcttagaaggagaaaagatcttggatgaggccaaaaattgtgccataaattctctcaagtttggtttctctcccagttccatcaacatcaaccgacactccaatctggttgttgaaaaaatggtccatgccttggagcttccatcccattggagagtacagtggtttgaggtcaaatggcacgtggagcaatacaaacagcagaaaaatgtggatccaattttacttgaattgactaaattaaatttcaatatgattcaggccaaacttcaaatcgaggtcaaggatttatccaggtggtgggagaatcttggcataaaaaaagagttgagctttgcaaggaataggttggttgaaagcttcatgtgtgcagcaggagttgcttttgagccaaagtataaagccgtcagaaaatggctcactaaagttattatttttgtactaataatcgatgatgtttatgacatacacgcctcatttgaagagttgaagccgttcacattggcatttgagagatgggacgacaaagaacttgaagaacttccacaatacatgaaaatttgcgtccacgcacttaaagatgtcacaaatgaaattgcttatgaaattggtggagaaaataactttcactcggtgttaccttatctaaagaaagcgtggatagacttttgcaaagcattatacgtggaagcaaagtggtacaacaagggatacattccatcgttggaagagtatttaagcaatgcttggatttcatcttcgggaccagtgattcttctcctttcatattttgctacaatgaatcaagcaatggatatagacgattttctacacacatatgaagatttggtctacaatgtatctctcataattagattgtgcaatgatttagggaccacagcggctgaaagagaaaagggtgatgttgcttcgtcgatcctatgctacatgaatcaaaaggatgcttcagaggaaaaagcaagaaagcacatccaagacatgatacacaaagcatggaaaaagataaatggacattattgctccaatagagttgcttcagtggagccatttcttactcaagctataaatgcagctcgtgtggcccataccctttatcaaaatggcgatggctttggtatccaagaccgagatatcaagaaacatatcttatcactggttgttgaaccccttagatag

SEQ ID NO: 534 - DNA, 1888 bp, Glycine max
agaagaataacaaaataacaaatatcaaaaggttcgcagctaggcaggaacaatgaatcactcatacgcgaatcaatcggctcaagaagttaatatagttacagaggacacaagaagatctgcaaattataaacccaacatttggaaatacgattttctgcagtcacttgacagtaaatatgatgaggaagaatttgttatgcagttgaacaagcgggtgacggaagtaaagggtctttttgttcaagaggcaagcgttttgcaaaaactagagttggctgattggatccaaaagctaggccttgccaactactttcaaaaggatatcaacgagtttctcgaatctatacttgtctatgtcaaaaacagcaacattaatcctagcatagaacatagtttacatgtatctgcactatgcttcaggcttttaagacaacatggatatccagttttgcctgatactttaagcaactttttagatgaaaaaggtaaagtgataaggaaaagctcatatgtttgctatggtaaagatgttgtggagcttcttgaggcctcacatttgagcttagaaggagaaaagatcttggatgaggccaaaaattgtgccataaattctctcaagtttggtttctctcccagttccatcaacatcaaccgacactccaatctggttgttgaaaaaatggtccatgccttggagcttccatcccattggagagtacagtggtttgaggtcaaatggcacgtggagcaatacaaacagcagaaaaatgtggatccaattttacttgaattgactaaattaaatttcaatatgattcaggccaaacttcaaatcgaggtcaaggatttatccaggtggtgggagaatcttggcataaaaaaagagttgagctttgcaaggaataggttggttgaaagcttcatgtgtgcagcaggagttgcttttgagccaaagtataaagccgtcagaaaatggctcactaaagttattatttttgtactaataatcgatgatgtttatgacatacacgcctcatttgaagagttgaagccgttcacattggcatttgagagatgggacgacaaagaacttgaagaacttccacaatacatgaaaatttgcgtccacgcacttaaagatgtcacaaatgaaattgcttatgaaattggtggagaaaataactttcactcggtgttaccttatctaaagaaagcgtggatagacttttgcaaagcattatacgtggaagcaaagtggtacaacaagggatacattccatcgttggaagagtatttaagcaatgcttggatttcatcttcgggaccagtgattcttctcctttcatattttgctacaatgaatcaagcaatggatatagacgattttctacacacatatgaagatttggtctacaatgtatctctcataattagattgtgcaatgatttagggaccacagcggctgaaagagaaaagggtgatgttgcttcgtcgatcctatgctacatgaatcaaaaggatgcttcagaggaaaaagcaagaaagcacatccaagacatgatacacaaagcatggaaaaagataaatggacattattgctccaatagagttgcttcagtggagccatttcttactcaagctataaatgcagctcgtgtggcccataccctttatcaaaatggcgatggctttggtatccaagaccgagatatcaagaaacatatcttatcactggttgttgaaccccttagatagaagtatatgttatgacaacaaataataatttccctttcgtccgagtgaaattgcatgataaatatgtagaataaaaacaatcgtttcacattcaaataaatgagaagtgacatattgttttaaggtttt

SEQ ID NO: 535 - DNA, 1845 bp, Glycine max
atgcagaccccaaagacaagaagtagtagtagctcctctgaagtgcctcagaaagtgtcccctcgtggtggacgccgactcaggcctgctacactggacactactgcatcttcattaagccaacctaacaaaacatcaaaggataatacaagtcccaaactcaccgaccgcagatcacccagaagccccgctcctgagaggaagcgtcctagcagaatattcgaattggaatctcagaattctcaactcaaagaggatttgaaggtggtgaggaaccagctcggtgtgtctgaatcatgcaagaagcaagctcagcaagatgctgaagagtccaagaagcaagtagcttccctatccttgaaacttgaagattctcaacagcaacttgtgaagttctcggctacagaacaatctcgtgttgttgagctccagaaaaccatagaagagcatgacaagacttggcaatccgagcttaggaatgcccaacagaagctctcagacaacaccgctgcgcttacctctgccatcgacgaaattcagcagctcaaggttcagcttgaattggtagctaactgtgagaatgcgcacacgcaaattgcggaatcatcagacgtggagctgctaaacttgaaggataacttggcagaatctctttctcttgtggagaacatgaaaaaccaacttaaagattccaaagagtcagctcaggcacaagctttggtcaatgagactttgaggcaacttgaggctgcaaaaagaactgttgagtttctgagagctgatgctgctaaagctgtcaatggctacaactttgcttctttggagttagaccaatctagagcacgggtgaactcactagaggaactagtaagcaaacttgagtttggcctcattagtaacaaatgcaacggttctataaattttgcagatgatagtatcatggagatattacaaaagggtgagacagattctaatcgcattgaagcacaaatttactctttgaggtctgcaatagagagtgctgaaactaagcaccaggaagaacagatcgagtgttctgtgaagattaggaaagcctatgagttgattgaacagataaaatcagaatcaagcaagagggaatctcagctagaggctgaattaaaaagaaagaatgccgatattgaagagttgaaggctaacctaatggacaaggaaactgagttgcagtgcattgtggaggagaatgagaagttgaatttgaagcttgaaaaaaggatgtcatcacaaagagaacatgaacttcaaaaggagcttcgaaaactagatgaatgcgtggctggattgaaggccgacctgatggaaaagaaaacaacgttgcaaagcatatctgaagagaatgaaatgctgaagttggagatcagtaagaggtttgcacatggtggtaaggtgatggaggaagttgctgcacaactagaggcagctaaggcttcggaacgcgaggcggttatgaagcttggtattgtgatggaagattcagacagaagcaaccgaaaggcggcgagggtggccgagcaactggaagcatctcaagcagcaaattcaataatagaagctgaactaagaaggttgaagatacagtctgatcaatggagaaaggctgcagaggcagctgctgcaatgctctcagcagggaacaatgggaaacttagtgagagatcaatgtctttggacaacaactataactctataatgaacaagtactcacctttttgtgaagagcttgatgatgatgattttcagaccaagaaaaatggcaacatgctcaagaagattggggtcttgtggaggaaacctaaaaaatag

SEQ ID NO: 536 - DNA, 2215 bp, Glycine max
ttgtctcatcagttaatgatatttttctgaactgttgtagtccttgtgggtcagggagcattcaagtgtagcgagttcctaatttttaatccgttttactttcctggaatacaaggcagtttaaccatgcagaccccaaagacaagaagtagtagtagctcctctgaagtgcctcagaaagtgtcccctcgtggtggacgccgactcaggcctgctacactggacactactgcatcttcattaagccaacctaacaaaacatcaaaggataatacaagtcccaaactcaccgaccgcagatcacccagaagccccgctcctgagaggaagcgtcctagcagaatattcgaattggaatctcagaattctcaactcaaagaggatttgaaggtggtgaggaaccagctcggtgtgtctgaatcatgcaagaagcaagctcagcaagatgctgaagagtccaagaagcaagtagcttccctatccttgaaacttgaagattctcaacagcaacttgtgaagttctcggctacagaacaatctcgtgttgttgagctccagaaaaccatagaagagcatgacaagacttggcaatccgagcttaggaatgcccaacagaagctctcagacaacaccgctgcgcttacctctgccatcgacgaaattcagcagctcaaggttcagcttgaattggtagctaactgtgagaatgcgcacacgcaaattgcggaatcatcagacgtggagctgctaaacttgaaggataacttggcagaatctctttctcttgtggagaacatgaaaaaccaacttaaagattccaaagagtcagctcaggcacaagctttggtcaatgagactttgaggcaacttgaggctgcaaaaagaactgttgagtttctgagagctgatgctgctaaagctgtcaatggctacaactttgcttctttggagttagaccaatctagagcacgggtgaactcactagaggaactagtaagcaaacttgagtttggcctcattagtaacaaatgcaacggttctataaattttgcagatgatagtatcatggagatattacaaaagggtgagacagattctaatcgcattgaagcacaaatttactctttgaggtctgcaatagagagtgctgaaactaagcaccaggaagaacagatcgagtgttctgtgaagattaggaaagcctatgagttgattgaacagataaaatcagaatcaagcaagagggaatctcagctagaggctgaattaaaaagaaagaatgccgatattgaagagttgaaggctaacctaatggacaaggaaactgagttgcagtgcattgtggaggagaatgagaagttgaatttgaagcttgaaaaaaggatgtcatcacaaagagaacatgaacttcaaaaggagcttcgaaaactagatgaatgcgtggctggattgaaggccgacctgatggaaaagaaaacaacgttgcaaagcatatctgaagagaatgaaatgctgaagttggagatcagtaagaggtttgcacatggtggtaaggtgatggaggaagttgctgcacaactagaggcagctaaggcttcggaacgcgaggcggttatgaagcttggtattgtgatggaagattcagacagaagcaaccgaaaggcggcgagggtggccgagcaactggaagcatctcaagcagcaaattcaataatagaagctgaactaagaaggttgaagatacagtctgatcaatggagaaaggctgcagaggcagctgctgcaatgctctcagcagggaacaatgggaaacttagtgagagatcaatgtctttggacaacaactataactctataatgaacaagtactcacctttttgtgaagagcttgatgatgatgattttcagaccaagaaaaatggcaacatgctcaagaagattggggtcttgtggaggaaacctaaaaaatagtcaatgttggctgtttacgagttatgacccgcttctaatgttatgattatgttaactgtaatgtttatgttatgcaattttgtctgaccgctaccctcctttttgtttggtgaaacgttgtctacagatgcttagtagtttgaatgaattaagcgcttttataattcaaggacgtgtaggtagagattagagattgtcaatgtttaacccaaaagggttggggtaaggttttctttccatcagt

SEQ ID NO: 537 - DNA, 3619 bp, Glycine max
tcccataacccattcacataaactttagtcaaccacgcttttaattcaacataacaccctctccttttcacttttttttaataataaattataaattattattctaaattctattattacccccctccgaccaccgtcctccgccactacttccagcgttacgaggttggcagagtttcctcctctactcgctccttccagtcttcttactgattctctagaatgaggattgctaaggaagaatcatcaagcagtgctgcacaggcaataagcttgatatcagcagtgaaggaattgcaaggagttacagctctggatcttaataaattattgagggactctgaaaatttcactattcattaccttactgaaaaaggatcattgctgaagattgatatggaaaagcttgtgggatctcttcctttgcaccttactacactgctgatgtcagctgttagagatgaagccctgttcagatacttattatgtggcattcgattattgcactccttgtgtgaattagcctcccgaaattctaagttcgagcagattgtgctagatgatgtgaaaatgatggaacagctgactgacttggttttctacatgcaaattgttcttggtggttacagacaggaatactgtgcttttagttatatgcaccttatgcattcaactcttgtagcctgcaatttacatcttttaacagcgtttatttcaacacaatggcaagatattgttcatgtattgcttgcgcaccccaaggttaacatatttatggatgcagcttttggatcagttcgcatggttgttagttttcttgagaatacactggtagcatatcatgaagatatttctgtggaatcaaatcttacagcagaacaaatggtttattatctctgtcagcagtgtgaagcttctctgcagtttcttcagtcattatgccaacaatttttttttaaggagcgcctgcttaagaataaggaattatgtgaaaagggaagcattctttttcttgctcaatccatcttgaagttacacattcagccatcttttccatccaggatcatggcagctatttctaggctaaaggctaaaatactatctattctgctgagtttgtgtgaagtggaaagcatttcttaccttgacgaagtagccagctcagcacgaagtttagatttggctaaatctgttgcattagaggtttttgacttgttgaagaaaacttttggaagagatcctggacatctcactgctgacagaagtttcccaatggggtttgtacagctcaatgcaatgcgtctagctgacatcttctccgatgattcaaactttcgatcttacatgatactttgttttactaaagttctgacagcaataatttcgctctcccatggagattttttatcctgttggtgttcatctaatctcttaaagatggaggaggatgcaagtcttgaatatgatatatttgctgcagttggatggattttggattatacttcactggatgtaagaaatgctacaaatttggaattcaacctaatccctaacagcatgcctaaggcttcttatgcacatcataggacatcattatttgtcaagttctttgcaaatcttcattgttttgttcccaacatatgcgaagagcaggagaggaacctttttgttctcaaggtcatggagtgcttgcaaatggatttatctaacttgctgccggggttttcttttgcttctgatgctcctaaagctgccattgctagcaagaacctccactcattgttaagtcatgcagaatctctgattcctaacttcttaaatgtggaggatgtgcaacttttaagagtgttttttggtgaattacaatcactatttacgtctactggatttggggaaaatcaagtccaagatagcaaatttgaggagtcattatattgggataagctttctaaattcaacaggaatgaacattatcagaaggcacagagtgcagggggatgcccgtcatctttaactggaaaagaacatgccgatcttaataagaagggtggcaacttcaaggaaggaatgtctgagaattctgcatttccagacatggaccaacataataccagagctgaagacacaaatcaaggcaagggcctaaataggctaaatcaggtagatgataaaggcatagctggtaaaactgcatctggaggagctagagaaatggacaaggatgctcagaatgttgaaacaagtggttcagatagtagttctgcaaaaggaaagaatgttgttgataatatggataatggagagctttcaaaatcgaatgagcgtcttaaaagaactgcagttgaggaaaatccagaggatgaaaagattgaactttcacaaaggagaaaacgaaaacgaacaataatgaatgataagcaggtgatgctgattgagagggcactcaaagatgagcctgatatgcagcgaaatgcagcttcacttcaatcatgggctgataaattaagtgggcatggttccgaggttacatcttcacagcttaaaaattggttgaacaatcgaaaagctaggctagcttatatggtttgatttgtaactgaatttcatgtttgttgtattaggttgaacaatcgaaaagctaggctagctcgcacagctagggatgttaaagcagcagcaggtgatgacaatcctgtcccagacaagcaaagagggccagtacctgggtcctatgactcacctggcagtccaggtgatgtatcacatgttgcgagaatagcttcaggtgataataaatccgagccttctctggctctggctcggtttgttgatattggttctccagaatttggtcattgcaatgcaggtcaatatgttgtgctcgttggtgtacgacaagacgaaattggcagaggaaaagtgtttcaggtgcatggtaagtggtatgggaagagcttggatgaattatccgcccatgttgtggatattagtgagctcaaagctgataaaggcatgcggctaccttatccatcagaagccactggcaacacatttgcagaagctgaaactaagttaggagtcatgagggtgttatggggttcaaacagagtttttgcattgccacctgaatgaatttaatcatgcttcattagcggcaatctgttgtcaatcttccttgtggttccctgtatgcgcatgtttttttttcccataaacattagctgaagcgataacagatgggtttgctatgaagaacaatactgaatagtaaagtctccagtttgttagccaaggatgggtagaaagtagaagaggacaattatggagaaaacaaggttgattcagcaatgaaagatagtttagtttaggatataaacaagagctgtagtcagcagcaaaaatgttggtagggtcttgtacaaaatttgtttctcagaattttccctgcagcatggcaattgacaatatgtgaaactatggtaacgagtgatgagatctgaatttaacttaaagggaaactgtgaacgtaaattctgtttagattaaaatttgcgaatcttgctcatttcatgccaagtgtaataatttcagaagaaaagtattagattattttgtttgt

SEQ ID NO: 538 - DNA, 1404 bp, Glycine max
tttcatttaacaaactacaaactacaaactaggcgcttatggagaatgtttggtagctacaatatataaaaatgaaaattttacaatgaatgaatatgaatatggaaacagccttacaacaaattgggtgcctctatagtcggggaaggctcccaagttgaaggttgtatcctactcctactgttctggtcaatcaaaaattcccgagatttttaactttattattattattttaaaattacaaaaatataaaataaaaacagcaaaattagacatcgctcttctctctctctaaaaatctccggcggtccttcagtccattttcctttccatttcggatctggttcttctctctctctctctctcttgcattccagttttttgcgtgtgcgaattaactcgaaaatgattccctttatttttggatcgtatgcagataggaatagatttcgtcagtgttgaaatcacgagaaattcatggctgctccaccggcaagagctcgtgcggattacgattatctcataaaacttctcttgattggcgatagtggtgtcggaaagagttgccttcttctacgattctctgatggttctttcacaactagtttcatcacaactataggcattgattttaagataagaaccattgagcaggatggaaaacggatcaagctccaaatttgggatactgcaggtcaggagcggttccgaacaattacaaccgcttactatcgtggtgctatgggcatattgctagtctatgacgttacagacgaatcttcatttaacaatatcaggaattggattcgtaacattgagcagcatgcttcagacaatgttaacaaagtactggtggggaacaaagctgacatggatgaaagcaaacgggttgtgcctacctccaagggccaagcactggccgatgagtatggaatcaaattctttgaaacaagtgcaaagacaaatctaaatgtggaggaagttttcttctctattgcaagagatataaaacaaaggcttgctgacactgactctaaggcagagccagcaggaattaaaatcaacaaccaactagatcatgcaacggctggggaagttgcacaaaagtcagcttgttgtgggtgaggaggcaacattattatccaagaacaagaaggaggaaaatacatgcatgatgataaattgatgatgattcgtgctttggattttacgcggtcattctttaatagtttctttcctagattaagttatatattaattcaaagttagatatgattgtgtcattgccccttgtgttgtttgtttgggcaacaaatctattgatcgttgatattttgaatggttaattgcattgatattctttaaaacgtaataaaattatattgaccctattcttagttaaaa

SEQ ID NO: 539 - DNA, 1429 bp, Glycine max
tgacaggacattgaataaagatagagtttgagaattccaaatgtggcccccgcagtgaagagcttccccaccacaacctcaagaaagccttgtccataagtactccaccccccacgggcttctcactcattcattcccatctctctctctctctgctcaactgaataaagcagagaagaataagaaaatgggtgtgttcagtacagtgctgctgtgccttatgtccctaatgtggatggtggatgctcgaattccaggcgtatactctggcggcgcttggcaaaatgctcacgctacgttctacggaggatccgatgcttccggcaccatgggtggagcatgtgggtacgggaacctgtacagccaagggtacggagtgaacactgcagcgttgagcacggcactcttcaacagcgggctgagctgcggagcgtgcttcgagatcaaatgcgcaaacgacaagcagtggtgtcactccggcagcccttccatcttcatcaccgccaccaacttctgtccccctaactacgctcttccaaacgacaatggcggctggtgcaaccctcctcgccctcacttcgacctcgccatgcccatgttccttaaaatcgccgaataccgcgccggcatcgtgcctgtcgccttccgcagggtggcatgtaggaagcatggtgggatcaggttcacaataaacggtttccgttactttaacctggttttgatcagcaacgtagcgggtgcaggggatatcgtgcacgcctacgttaagggatcacgaacggggtggatgccaatgagcagaaactggggacagaactggcagtcaaacgccgttttggtgggtcaggctttgtccttcagagtcaccgccagcgaccgtcgctcttccacctcttggaacattgttccatcaaattggcaatttggtcaaactttcactggaaagaacttccgtgtctgaacaccccctttactttcttaagatatataaaatacaagtttattttctttttgtttgggttcccaccatttatctatttcctgatcttttttactgcagaggaagaaacaaaaaaatagtcagtgacaagtttttttacttttgcttctcattggtgggtttcatttttttaattaatgtataattgatgattcccgggtgaagttttgcgttccgattagtgtaggaaatgctgaagcggctaagcaaagagggtagcccgcggctaaattttacagaatgatgctattgtattaactaatatatattgttccgtcatggatctaggaagcgtgctttactttacgcaaaagctcagatgggaacagtatttggtttgtttgggtggggtgtataatgtttgtcggaaaaacccagctgcagacttgtctgggatttaatgcgtgtttgtcaaaaattaattctttc

SEQ ID NO: 540 - DNA, 2626 bp, Glycine max
tgcggagacaatctaatataactgctcattttaatgcaagggcagtcatcaactatgcttctacatacttagcagtgtgcgtgtaagataggctttccaatcgaaaccggtggggtcaaaccatccagaattcaagtttatttatgagtattggattactgatgttccatgttcaatcaatccttatattggcatggttcctgagatatggtgttgcagaagaggttagactatagcttttatggctatcaggtgccaaccaagcgccgagctacccgattagctaagaggagggttacatttcaaagaaggttggaagacaatcagatgtgtgcatttgacttattggccactgtagctgacaatttattgcaagagaaacagaatccaaccacatccagtgatagatcatcggaaaaggatggggatggatttcctaaagaggaacgccaggatgcaaataaaccattcaaaactgagctttctgatgaagcaagttgtgacagaaaatgtcagcttgaatttgttaaagaaggaagctcaaatgcaaatagtttcaaagttgagctttcggatgaaggaagtagtgacagaaaatgtttctctaatatttcttcacaagtctacaatcaaaattgttgttcgaaggaactccccgaacatgaaattgatggccatttatgcattgcttctatagtaacaagttctagttgctcagagaagattgttgctgagacactggtggatggaaaaggccacaatgggatggaaaaattagctagcaaagttgaattaggttcctgtggatatctagagagtaggggttgcaagttagatggtgatgttagtaaagtaaaagacgataagtttgggaaggttcccattgatactgggactgggttgtgctgttttgaggataccttggatgaaaaacctctagcactgatcagttcatgtggcaatgccaagatgtccgggtatgatgacagcatgcctcagagctcatggtccaaaggttgtgacaatgtactggtagatagtagagatgatgacgaaaacttttctgggtgtgctcaccccagtaccaaaataaagtcctttaggccaattacttgtatagatgatagaaaaacaaagaaaagattggcttctaaacatcataaagtttctcaagaatccaagcatgatatactatctaacagtgttttggatggaaatttgaagtcagtttacagcagtaggaagaactattataaaagccaaagatctcaaatgaatattcctttcaaaaagaggaagctttttaactgcagctctgatacaaattctaacggatatatcagaagtgatgacacttgttattcacccaagaatgacacgaaccaaagtgtttcttgttcatcttctggaatgagccaagatcatggaacatcatccttgggacactctgcattacgatctagagattcttacgtgaagcttaggatcaaatcatttagagtgcccgagctttttatcgagattccagaaactgcaaccgttgggtccttgaagaggacagtgatggaggcagtgactgctgtacttggaggcggattgcgtgtgggtgtgattctccatggaaagaaggttagagatgacagtaaaactctacttcagactggaatttctcatgataaccacctggatgctttgggcttcgccttggagcctaattgttcacgaaaccgaccatctgcatgtgctacaacagattctctccacattcctagtgcagatatgcctcagcctttaatagggtacccttcaagtcctgctgtaattcatcagaggattcagggcttttctaacatgttagccaagcatcaagcaaccagttcaggtaaccttgttgaaagtgatcatgattcagcaccttctcctatcaacacatccggtgaaaaatatttgtcagattcaaaagaactaattactgttcctgaaatgggtatggaggcactagctgtgctacctgtgcatcagaagtcaaaacgaactgagatcgcacagcgccgaattcgtaggcctttttctgttactgaagtggaagcactggttcaagcagttgagaaacttggaactggaaggtggcgcgatgttaaacttcgtgcatttgacaatgcaaagcatcggacatacgtggatttgaaggataaatggaaaacactggtgcacacagcaagaatatcagctcagcaaaggaggggagagcctgttccccaagaacttttggacagggtcctaactgctcacgcatattggtcccagcaacagactaagcaacagcttaagcaccactcaacaaaaccttgccttctcctttagtaaggacttgacaccaccacgtgccttcatagatggcttgttaaaagtgtcatttatcatttttttcttcctgtatttatgacaaagtgtgtttatcactttgattttcagtactatgtcacactttatctatcatgttaaaattagaacaaggtgatgcctatagagaatttgcgtcacaagttggttgttaactctaaagtcaaggttcggtgtgtaactggagaggaggggcacgtgttgatgatagaagtttatctgc

SEQ ID NO: 541 - DNA, 7060 bp, Glycine max
tcaagattgacaagcaagtgctatacacctctcatatctaaggtttcaggatttgaaatcagagatggatccagaaagatcagtagaggatcaattctccaagctgcatccttccatgccagtaaacaccagaattggaatagtgggtgctggtccaagtggcttatcagttgcttatgcactggtcagacttggttataataatatcactgtcttggagaagcatcatacagttggtggcatgtgtgaatcagttgaaattgaaggaaaaatatatgatctaggtggccaagttttggctgcaagcagtgctcctgtcatctttcacttggcaaaagagacaggctgtacactagaagaaatgaactcccacaagcttgctgttattgacagctcctctggaaaataccaagatgttaaagttgctgatgattatgtatctgttatgtcactaacattgcaaatccaagaaaaggtgaagaattctggtcgttttggggttcatgctctcagtgaagttgcttcagacttagctccagattatcttgagcgtcatggacttaaatctgttcctaaatctgtggcttatggttatactgcttcaggatatggatttattcaagacatgccttatgcttacattcatgaatttaccagaacttccatggctggaaaaattcgacgattcaaaggtggatatacaagtctttggcagaggattgctgaatcaattccaataaaacttcactatagcactgaggtgttggcaatcaggcggaactctgacactgtcactgttaatgtcaagggctcaaatgaaatcgaaactatggaatttgataagatcataatctctggtaactttccattaaaatatggaagaacttatagatcggcgccttcaacttgcttagagaatgaaacagaagtaatggatgcaagtgagcttgaaaaggatttattcagcaaagtagaaacaaatgactactacacaacagttttaaagatcaaagggctggaacgtatgccggttggattttattattttagtgaatatatggaagatcccagcacaattggaaatccagttgccatgcagaaattttatgctgacagtaacatattcttgttctggtcctatggaaactctgctgatattaagggaccaactgtcactgagcttgcaatcaaatcaatagaatccatggggggagaagttcagaatatcattcttcaacgtcgctttaagtattttcctcatgttagcagtcaagatatgagaaacggattctatgaaaagttggagtcagagcttcaaggctcgaggaatacttattatgttggtgggcttatggcatttgagcttacagagagaaattcatcttatgccatggctttgatctgcaagaactttgcaaatagcagtgatttgccagtgtttccttacactaagagtttgtttcccttgcaaactgatatccagaaaaaggagcctaaagaactagttgaattgcctggagtgcaatttcccaatttgcctgctttgaatagctatttaaagcactggggaactcatccaatcactcaaaacagaactctttatacttggctaaatgaaggagggactgtggttggcaagaggacatatggagaacaacatttaaatgcttcttgcattgcacataagctcttaacaagccaaaagccggttatcaagcctggtgacagggttctcctagtctatgttcctggcctagattttgttgatgccttctttggatgtctaagagctaaagttttaccagtcccagttcttcccccagaccccatgcagagaggtggacaagcacttcttaaaattgagaacattgccaagtcatgcggcatagtggcaattttatcaacggcatcttaccacacagcagtacgtgccggtctagtgaaaagcttgatctcattaactgggaaaaatggtaaatacacagctcaatggccaaaacttccgtggctgcacaccgatacttgggtcaataactcaagaaattcggctgtggaagatgtagatgatcaatgtgaaccccagcctggtgatgtatgtttcttgcagtttacctcaggttcaactggtgatgctaaaggagtcatgataacacatggagggctcgttcacaatgtgaagttgatgagaagtagatacaagagcacctcaaggacagtgctagtgagttggcttcctcaatatcatgacatggggctgattggaggactttttacagctcttgttagtggtggatctgctgtactgttttcaccattgacatttattaagaagccactcttatggcttgaaaccatcagcaagtatcaagcaactcacagtgccggacccaactttgcttttgagttggtggttcgaaggttagagtccgagaaagacaagcttcagagtttagacctttcatccatgattttccttatggttgctgctgagccagtgaggatgaagaccttgaaaagatttcttgatctaaccactccttttggcttatctcaaaaggtgatggctccaggatatggcttagcagaaaattgtgtgtttgtgagttgtgcatttggagaaggatgtcctattcttgttgattggcaaggaagagtttgttgtggatatattcacccaggcgattcagacgttgacattataatagttgatccagagagtggtgaagagcttgaggaagatggaagggaaggagaaatctggataagtagtccaagtgctggaataggatactggggaaaggaagaactgagtcagaaaacttttagaaataagcttcagaaccatcctggacgcaactacacaagaactggagacttgggaagaattatagatgggaagctattcatcactgggagaatcaaggatcttatcattgtggctggaagaaacatctactcagcagatgttgaaaagacggttgagagttcatctgaatttcttcgtccgggatgctgtgcagtcattggtgtccctgaggagattttatcagcaaaggggatttccctgccagatggatcagaccaagttggcttggttgtggttgctgaagtaagggatggtaaaacagttagcaaagatgtgattgagcatattcagacacgtgtggttgaagaacatggagttagtgttgcttctgtcaagttgatcaagccaagaaccatcagcaaaacaacatcaggaaaaatcaagagatttgagtgtctcaaacagttttcagatgaaacactgaacctggttccacaacctattttgacaaagaaatcactgttgaggtcatttactacaggaacatgcagagaaggaagaacacctcgggcacatttggtgagaagtagttctcctctacctattccaagaatcagcaacaaggaaattgtggaacacttgaaaaggattatttctgaccagtctggaatcccggtcaacaatatctcagtcacagacaacatgtcaacctatggaattgattcaattggagtggtcaaagcaactcaaaaactcacagatttcctgggagtgccagttgcggctatagatgttttcactgcatcatgcattcaagaattggctaacttctctgagaatcttctactcaagtctcaacctcaactcatgagcaattcaccacatgctccagaagctgaaattgattttactgaagtggttgtggatgtatccaagtctcgccaatggggtatccgtttacttcaactcctagcacttgtttatatttctatcatgctggtcactcctgcttatctatccatcactgcttttcaaagtttcataccaaatgccagtgaatcggtatatggaatgccttggtcaagctatttgatttctttgactttggcaccactttcttggatcctttgcatagtttccacttgcctttgcatttccttttttgggaattctttcttgaggccaaactatgcccttacacctgaaatatccatttattcaatggattttgttaagtggtgggcgctctataaaactcaggaaatttcttcaaaagttttggcaacacacctcagaggaacagtgtttctgaaatactggtttgagatgctcggtgcaagaattggatccttagttttgcttgacacagtggacatcaccgacccatctctggtttcaattggagatgaagttgccattgcagaaggggttttggttcaaagccatgaggtgaagaatggaattctaagtttccttcctattagaataggtaaaaattcttcaattggaccttattctattattcaaaaaggaagtatcatcaaagaaggatctgaagtacaacccctgcaaaaggttgaaggaggccaacatgtactcaaacctgctaagcataataacgttaaagagaatgccctgttgcttgtttctaccagcaaaatacagtccaatgccatgtaccattttctggggatctatctcactggctttctcagctcccttgcttcagctattgcttacatcttgtacataaggctcttccagatacctgcatcattccaacacttctcatttctttgtgtatgcggtgccttccactggatcccatttaccgttgttgcatatgccaccatgttttctgatgtcccatcaaatcccattgcctttaccatttcatttaccagcgcatatctgcttcatggcctcatactcacctctctcacttgtgctttgacacgtttgctaaaattcaaccaaaatcaaacccatttcaaaacctggcttagacatcaattgaccatttcctgccaccatagatttgcaaagcttctctcaggaacagaagccttctgcttatatttacgccttttgggtgcaaaaattggcaaacactgttccattagagccatcaacccagtttctaaccctgagttaatgtcaataggcgatggtgtccatcttggtgatttcagcaagataatcaccggttttcactattccaatggatatgcttgtggaaaagtagaggttcaggataattcagttgtggggagtcaaagcctaatcctcccaggttctgttgtagaaaagaatgtcattctaggtgcactttcagttgctccaatgaattctatcctccatgagggtagcgtgtatatcggatctcaaacccgagttgcaaccagaaactcttcgtatcatttagatgaaaggatagaggagatggacatggagtacaaaaaagtagttgcaaacatggctgcaaatttagccgtcactactattaatgtcaaagcaagatatttccaccgcattggtgttagtggaaagggacacttgaaaatctatgacaaacttgatggcaatattccactacacaagattttttaccctggaaaaagctaccctatcatgttaagacacagtaatagcttgagtgctgatgatgatgcaaggattgatgcacgtggtgcagctttgaggattctttctgatgaatcaccagattctaataacctgcagcatgcttccctcattgacctgacactaaaaactggcaacgcattttatgctcgcactcttgctgattttgcaacctggcttgtgtgtggacttccagcgagggaggaacttgttaagcgcaccccacatgttcgtgatgcagtgtggaattcccttagacatgcaaactcatacgctgaattgcactactattcaaacatttgcaggcttatgcgcttcactgatggacaagaaatgtacgtgaagtttaagctaagacctattgacacaagcattagtgaggacacaggtaaggttgtaccaactgggattcttccaccagaaacgggtgcaattcctagggatgaaaaggacacacgtcctttgcttttccttgctcaagattttcaacgccgtgtgaattctcctggtggagtttgttatgtgtttcaattgcaactccgagcagtgccagaagatgaagccgcacgtgacattgcactggactgcaccaaaccatgggatgaaaatgagttcccttacattgatgttggagaggtaaacatcaatgagaatctctctacggaagaatcagataggcttgaatttaacccttatctcaaaagccatgagttggatgtgatccctgctacttccaacacccaaagtgcttcaattgatcatggccgttcattgatctatgagatttgccagcacgttcgtaacagacagccactcccagaatcttggaggaacctcgtagagcaatctaacgttaaggtagacttgtcttgctgtcccgtggcagcagcattgcccaaaaaggagacgacaaagaaagttacaacaaccttaaccttgacaagaacctggtaccagacattctcagcacttttcactcaaccgttgctgcaaactgttttgccttacacggtgatgggtttagcagtttttgctcctttgaactttcttgttaaccttaagaacgttgagaaactccaagtgcaatggttctttcctttgttttgggttgtctcgggtgtcatggctgcactggcatgtgttgtgaccaaatgggttctcgtgggaagaaaaaaagagggtgaaaccgtgcccttatggagcaaaagggtaatcatggatagcacgtggcaagcgattagaaccttggttggggattatttcatggacatggcaagtgggtcgtttttgtttgtgatgtggatgaagttgatgggtgcggacatagacatggatggtggtggggcctacgtggacagcaccggggctatgttgaaccctgaaatggtgacgattgagagagggggttgtgtgggaagagaggcattgctatttggacacatatatgaaggtgatgaaggtggaatggtgaagtttgggggaatcaaaattggtgaagatgggtttgtgggaagtagagctgtggtcatgcctggtgtgcatgtggagaatgaggccaatctttctgctttgtctctcgccatgaaaggagaaacagttaggtcaagataa

SEQ ID NO: 542 - DNA, 2562 bp, Glycine max
atgtttcctttcgggcaaaagggtcaaaagataaaggggactatggtggttatgcagaagaatgtgttggatatcaacagcatcaccagtgttggagggatcgttgaccaaggcttaggcttcataggcagtgcagtcgatgcacttacttttgcagccaccaaaatctccatccagttgattagtgctaccaaggctgatggtgggaaaggaaaaattggaaagagtacaaatttaagaggaaagataacattaccaaccttgggagctggcgaacaagcatacgatgttaattttgaatgggacagtgacttcggaattcccggtgcattttatattaagaacttcatgcaaaatgagttctacctcaagtctctaattctcgaagacattccaaaccacggaaccattcacttcgtatgcaactcctgggtttacaattcaaaaaactacaagactgatcgcattttctttgccaacaatacatatcttccaagcgagacaccagctccacttttgaagtacagagaagaagaattgaagaatgtaagaggggatggaactggagagcgcaaggaatgggataggatctatgattatgatgtctacaatgacttgggcaacccggatagcggtgataaatatgcacgccccgttcttggtggttcagccttaccttaccctcgcagaggaagaaccggaagaggaaaaactagaaaagatcccaacagtgagaagccgagcgattttgtttaccttccaagagatgaagcatttggtcacttgaagtcatcagattttctcgcttatggaatcaaatctgtatcccaagatgtcttgcctgtcttgactgatgcattcgatggaaatattttgagccttgagtttgataattttgctgaagtgcacaaactctatgaaggtggagttacactacctacaaactttcttagcaagatcgcccctataccagtgatcaaggaaatttttcgaactgatggcgaacagttcctcaagtatccaccacctaaagtgatgcaggtggataagtctgcatggatgactgatgaagaatttgcaagagaaacgattgctggtttaaatccaaatgtcattaagattatagaggagttcccactaagtagcaagctagatactcaagcctatggtgatcatacctgtataatagcaaaagaacatttggagcctaacttaggtgggctcactgttgagcaggctatccaaaacaagaagttgttcatcttagatcaccatgactatctcattccttatttgaggaaaataaatgcaaataccacaaagacttatgctacaagaaccatatttttcttgaaagatgatggaactttgacaccattggccattgagttaagtaagccacatcctcagggtgaagaatatggtcctgttagcgaagtctacgtgcctgccagcgaaggagtggaagcttatatttggttactggcaaaggcttatgttgttgtgaatgatgcatgctaccatcaaatcattagccattggctaagcactcatgcaattgttgagccatttgtcatagcaacaaacaggcaactgagtgtggttcaccctatttacaaacttctgtttcctcactaccgtgacaccatgaatattaattcacttgcccggaaagccctggtcaatgcagatggtattatagagaaaacattcttgtggggtaggtactctatggaaatgtccgctgtcatttacaaggactgggttttcactgatcaagcattacctaatgatcttgtaaagagaggagttgctgttaaggacccatctgctccccatggagttcgtcttttgattgaggactatccttatgcttctgatgggctagagatatgggatgccatcaagtcctgggtgcaagaatatgtctcattctactacaagtcagatgaggaactccaaaaagaccctgaactccaagcttggtggaaagaacttgtagaggtgggtcatggtgatttgaaagataagccatggtggcaaaagatgcaaactcgtgaagagttggttgaagcttccgctatcctcatatggattgcttcagcccttcatgctgctgttaactttggacagtatccatatggaggtttaatcctaaacaggccaactattagcaggagattcatgcctgaaaaggggtctcctgaatatgatgcgttggctaagaaccctgagaaggagtttttgaagactattactggcaagaaggagaccctcattgaccttacagttatagaaatcttgtcaaggcacgcatctgatgagttctaccttgggcagagagatggtggtgactactggacttctgatgccggtccattagaggcatttaagaggtttggaaagaagcttgaagagattgaaaagaagcttatagagaagaacaaagatgagacattgagaaaccgctatgggccagctaaaatgccttacactctgctctatccttctagtgaggagggattgactttcagaggaattcccaacagtatctctatctaa

SEQ ID NO: 543 - DNA, 909 bp, Glycine max
atgacgttgtcagcaaaatctgaatcggatatcacaagcttagctccatcttcaccttcaagatcaccaaagcggcctgtgtactatgtgcagagtccttcaagggattctcatgatggggacaagtcatcttcaatgcaggcaactccaatatcaaacagtcctatggagtctccctcacacccttcattcgggcgtcactcaaggaactcttccgcgagccgcttttcggggattttcaggtcatcttcgggaaggaaagggagtaggaagaggaatgataaggggtggcctgagtgtgatgtgattctggaagaagggtcttatcatgagtttcaggacaagggtttcatgaaggcgcttccaggccttgattacctttgtggttgtcttcgctgtgttttgtttgatcatttggggccttacaaggcacaaattgctgttaagagtttgacggtgcataatttctatgttggagagggttcagacttcacgagtgtccccacaaaaatgctgacagttaatggcactttacgcatgagcatctacaaccctgctacattgtttgggatccatgtgcactccacacccatcaatcttgttttctcagacatcactgttgctactggcgagctgaagaaacactatcagccaagaaaaagtcaccgcattatatcagtgaacctagagggtactaaggttcccttatatggggctggatccaccataactgtatcccaaactggcgttgaagttggactcacattgaactttgaaatccgttcgcatggaaatgtggtgggtaaactggtcaagacaaggcatcgtaaggaaatcacttgccccttggtcctcaactcttctcgatcaaagccctatcaaattcaaaaggaattcatgcacctatga

SEQ ID NO: 544 - DNA, 2414 bp, Glycine max
gacggtgtgaaaaacgaaagagaagcttgcgacttgcgaatacgattaacaaatagttactttggttcgtaatcgtgctcttgcagtttgaaatttgaagcacccttttgtagttcttgctttgttgctcgcataaattaatccaacaagttgcagttaagctagttttcggcgaatccaacaatgaggaggatatcaacttttcctcctttctgtcagagattaaaacaaacagaaaatgagattgcccaaatgtttcgcttgcctaattcccatgaaggaaaccaccttaacaattccatgaaaggaggacatgtgttaaggagggacccttattcccggacattggatgagaggttcattagaattttgaaaatattcaaatggggacctgatgcagaaaaggccttggaagtgctgaagctgaaggtcgatcctcgcttggttcgcgagattcttaagatagatgttgaggtcagtgttaagattcagttttttaagtgggctgggaagaggaggaattttgaacatgactcgaccacttacatggccttgattcgctgcttggatgaacataggatgtttggtgaagtgtggaagacaatacaagacatggttaaaggttcatgtgcaatggctcctgctgagttgtctgaaattgtgagaatcttggggaaggccaagatggtcaacagggcattatctgtcttttaccaggttaagggtcgcaagtgcagacctacggcgagcacttataactctatcatcttgatgctgatgcaagaggggcatcatgaaaaggtccatgagctgtacaatgaaatgtgcagtgaagtgcattgtttccctgacactgttacatatagtgcacttatatcagcatttgcaaaactaaatcgcgatgactctgctattagattgtttgatgagatgaaggagaatggattgcagcccactgctaaaatttatacaaccttaatgggaatatactttaaggtgggtaaggttgaagaagctttgggactagtcaaggagatgagagcacggcggtgtctcctaactgtttttacttatacagaattgataagggggctggggaaatctgggagggttgaagatgcatacatgacatacaagaatatgctgaaagatggttgtaaacctgatgtggttctgatgaataatttgattaacattttgggaagatcaaatcacttaagagatgctattaagctttttgatgaaatgaaattgctgaactgtgcacctaatgttgtgacatataataccatcatcaaatctttatttgaggccaaagctcctctttctgaagcttcttcatggtttgagaggatgaaaaaagatggaatagtccccagctcatttacttattcaattcttatcgacggttactgcaaaacaaatcgagttgagaaggctttgttgcttcttgaggagatggatgaaaaaggctttccaccttgtcctgctgcctactgcagcctgatcaatacccttggagtagcaaaacgctatgatgttgcaaatgagctattccaggagttgaaagagaactgtggatgttcaagcgctcgtgtatatgctgtaatgattaagcattttggaaaatgtgggcgactcaatgaagctatcaatctgtttaatgagatgaaaaaacttggatgcacccctgatgtttatgcttataatgctctcatgacaggaatggtaagggcagaaagaatggatgaagctttctccttgtttagaactatggaagaaaatggttgcaccccagatataaattctcataatattatcctaaatggcttggctaggacaggtggaccaaagggtgctttggaaatgtttacaaaaatgaagaactctactattaagccagatgtggtttctttcaacaccattcttggttgtcttagccgagcaggtctgtttgaagaggctgcaaaacttatgcaagaaatgagttctaaaggattccagtatgacctcatcacctactcttcaatacttgaggcagtcggtaaggttgatgattgtaaaatggtagagtcatgagagcaatccggttttacctttttgactgagtctgtcattgattattaatcaataccttgaattttttgaagggtaattgaccaaaatggggttgtttttcgaaactaaataccaagatggatgattcaactcttctcctcctaggtgtcactattatgtagagtgtcactagttcaagtgactaagtgacttggtggcgtcatcctgagtgatttcatccaagtggcatcagactggaaggtttactagttcctgacttagtaatgtcaccctgcatgccttcacacaagtggcgtcatattgggtggcttcacttgattatagtttattactac

SEQ ID NO: 545 - DNA, 1074 bp, Glycine max
atgtctgcctttgttggaaagtacgcagatgagcttatcaagaatgccaagtacatagccacacctgggaagggcatcttggcagcagatgagagcactggcaccattgggaagcgcctatcgagcattaacgttgagaacattgaggccaaccgccaagctcttcgcgagcttctcttcaccgctccagatgccctccaatacctctctggtgtcatcctctttgaggaaactctttaccagaaaacctccgatgggaagccttttgttgaggtccttcaagagaacaatgtcatcccaggcatcaaagtggacaagggtgttgttgagttggctggcacaaatggtgaaaccaccactcagggattcgactctctcggagctcggtgccaacagtactacaaggctggtgcacgcttcgccaagtggcgtgcagtcctcaaaattggcccaactgagccctctgagctttccatccagcaaaatgcacagggcttggcacgctatgccatcatttgccaggagaatggccttgtgcccattgttgagcctgagattttgactgatggggctcatgacatcgccaaatgtgctgctgttactgaaactgtgcttgcagctgtttacaaggcactcaatgagcagcatgtccttcttgaaggaactcttctcaagcccaacatggttactcccggctctgatagcccaaaggtaccaccagaggtgattgctgagtacacagttcaagcactccgcaggactgtcccagctgcggtgccaggggttgtgtttctgtctggtgggcaaagtgaagaagaagctaccctcaacctgaatgcaatgaacaagttggaggtgttgaagccatggactctctcattctcattcgggcgagcactgcaacaaagcacactcaagacatggggtggaaagaaggagaatgtcgccaaagctcaagaggcatttctggcaagatgcaaggccaattctgatgctactctgggaaagtatgttggtggaagcggaagtggcttgacttctgagagtttgtatgtcaagaactacaagtattaa

SEQ ID NO: 546 - DNA, 2508 bp, Glycine max
atggggtggttgtttgttgtgtgttggcatttgttgctgtttcatttttcattctcccattccttatgccacactcatgacagttttgccttgcttcacttcaaggcctcctttccttttaatacaacttactattataatgcttatgaatgccctgttactaacctgaagacaacaacatgggaaaatggaacagattgctgctcttggcttggagtcacctgccaccccatctccggtcacgtgaccggcctcgacctcagctgcagtgggctttatggtgaaatccatcccaacagtaccctttttcatctttctcatctccaatcactcaacctcgctaacaatgacttctatccatctcccttgtcatctctcttctgtggatttgtgagcctcacgcacctaaacttgtctaatacttactttagaggtgaaattccttcccaaatctcacacctttccaaattacaatcacttgatctctctcttccacttaattctcaatttctattaaagtggagagaaagcacttggaagaggctgctccaaaatgcaacagttttaagggagcttgtgttgaatcgcacagatttgtcatcaacttcaatgaggccactcaatttgtcttcctctttgatcactctaagtcttagaggaactgggttaaagggaacgttggcagatggaattctctgtttgccaaatctgcaacacttgtatctatcagataattttgaccttcatggccaacttccgaacttgagttgtagcacaacttctgtcagtgtcttacagatctcatctaatgaattccaaggcccaatccctccttctttctctaaccttgtacatcttactttcctggatctctcatttaacaaactcaacggttcaatcccacccttactcttagcccttccacgtcttacttttctgtatctccgtgataattatctcactggtcaaatcccaaatgtctttcaccagtcaaacatatttgaagtattggatttgactcataacaatatccagggtgagctgccatcaacactttcaaatcttcaacatctcatttacttggatctttcatttaacagattagagggacctctgcccaacaaaataacagggttttcaaacctaacttggttagtgttcaataacaacttactgaatgggaccattccttcttggtgtttctctttgccatcgttgatgtatttatatctaaataataatcagttcacagggcatatacctgcaatctcatcatattctttgcagtctctaattttgtgctacaacaagctacaaggtctttatctttcgcagttaagtcaattatcactcaactttgaatcaagggccaattatagtttctccagcttactgcaactggacttgtcttctatgagcttaacagaatttccaaaattatcaggaaaagtcccaattttgaaaatcctgtatctgtccaataacaaattgaagggaagagtgcccacttggttgcacaaaatggattctttatctgctttgagtctatcccataacatgttgacaacaccaatggaccaattctcaaggaactaccaactcacaatcctggatctaagtttcaacttactcactggcagcatctcttcctcaatttgcaatgcaagttcaatggagtctctcttcttgcctcacaacaagttaacaggcattattccacaatgcctcgtgaacttaccatatcttcaagttttggatcttcaaatgaacaaactttatggcactttgccaagtactttttcaaggaacaacaggctaagtacgctgaatctcaatgataaccaattagaaggtatattgccagaatctttgtccaactgcacactactggaggttttaaatcttggcaacaatcaaatagaggatacgtttccccattggcttcaaaaactaccatatttgaaagtattggttttgcgggccaacaagtttcacggtctcattgccagttttaagaccaaccatggatttccaagtttaattgtttttgatatctcatccaacgacttcagcggcccaataccaaaaaagatcattcaagatgaagaggatagcagttcacagcaatacatgcgaacgcaagttagtcttggagcattcgattcaactgtgactgtaacaatgaaaggcatgagtatgctacttacaaaaattccaacagactttgtaagcattgatttatcaggaaacaaatttgaaggagagattccaaatgttattggggagcttcatgcactcaaagggctcaacctttcccataacagactcagtggtcttattccccaatccatgggaaatttgacaaacttggaatcattggatctctcttctaatatgctgaatgtggccataggatatggatgtggaatggtatttggagtgggcatgggatgctttgtgttgttaacaggaaagcctcaatggattgtgagaaagtttggtccttaa

SEQ ID NO: 547 - DNA, 1550 bp, Glycine max
tttaatttcaaaaacaccctttctatggaatcacgattctgttaccaattagttttcacctctcctcccccctataaataatgaaattgtgattccattgaacaaaatgcacaatggaatcatgattctgtagagcgctggtttttgcctctattatcacaatggaaccatgattcccttatattttgtggcacccccttaagacaacagaatcactcacggttctatgttaccaaatatccttgcgaaaatgtgattccatttatggcagaggagtgcacagcgatggatgtgcatggcagcatggtgatggtggcggtgcaatgtggaggagatgggatagggtagtggcacagtgcagaggtggtcgatgaagatgatggttgcgcgactatggtggggggttgggtgagaagaaggtgggatgataggggaagaggaggagaccaatagtagatcccttatagaagtaatagtccaattagttagttcatattttgggtgaaataggccaaagcccaaaagtccattattactaatttgcagtttttttttttttaaaaaatataatttgggggagatgaattgaattgggaaagaagtaagcggttttccctggcaatatgatacgaaatgcagcgattaaggagttccttaaaaaaaagtatctcaattcacgggctgccattgaagatacttatttttccaccaaggatacttttgagagacatcgcgtggttttcaccgttggaacttccattgcttccgttgccactgcttggttcggttattccttgcgccatttacatgacatcaaagttgatcaaaggcttcaatctatcgaaaattctatgaaaaacaattccaatctccaacattcccaaatcaaagacattgtcgcgggttccgcttccggagcttttagtatccctgcttgtgttgccactgctggaacctccttaatcatcgggtttgctcccacacttacttgcaaacaacatgctcgctctgctccttaacatatagtatgccttaggatggagaggtggaatctggtatgcaactaagaagttccgaaaggagcagatgaaaatgctaggacagattacacctaaaagatggcaattgcttgggaagataaagcctagagggtttcaattccagttccttagaaggaaacttacaagattcaaagtgtctgacactgccacaaaaaatctgaaacgagtataaagggtgtttctaccgcacatattgctgtaaaatccgattagtatactactataaatggttctttcaagcaccaatattgatagagatggctgcggatactggattaggctttcaattagacaaacagagtagcaacttagttattatcaattatcatcaaatttttctctgatattttattttggcctgcagttgctcgcccttcataaattcttcatccctcatgggaggagtgccttagaaacttatgttctgttttgatcaatttataatggaggaaattctgaaatacacaccctttaattttggggactggc

SEQ ID NO: 548 - DNA, 2389 bp, Glycine max
taaaaccggcgtcggttgaagcgtcgatccacttccacccgtgtctgtgttgtgtgtagttaacactttgactccacagcaacaacaacgttaaagcagaaccacacggaatccacacgcacacaacacacatattcgtgtgtgtttgaagtggaagaaagagaacgcataacacagaacacagtgcagacagcaagtgatgacgtcgaaacagacatacagcgtgtgcttctgctggcggcggcggttcaagctggcgctggcggaggcgccgtcggaaatcaagaccctattcaatgagtactccgagaatgagctcatgacaccttcgcatcttaagagattcctggtcgatgtgcagaggcaagagaaggccactgaagaagacgcgcaagccatcatcgatagcttcaggcatttccatcgcagaggcgctggcctcaatctcgaaactttcttcaagtacctcttcagtgacgataatcctcctcttcttccttctcatggggtgcaccatgatatgactttacccttgtcacattatttcatatatactggccataattcctatttaactgggaatcagctgagcagcgactgcagtgacgtccccatcataaatgcactgaagaaaggtgtgcgggtgattgaattagacatatggcctaatgcatcaaaggatagtatagatgttcttcatggaaggacattgactactcctgtagagcttatcagatgtttgaggtctattaaggatcatgcctttgtggcatcagaatatccagttgtaataaccctagaagaccaccttacaccagatcttcaggctaaagtggctgagatggttacccaaacatttggagacatactatttactcctaactcagaaagtgtgaaggaattcccttctcctgaatcacttaagaagagaattattatatcaaccaaaccacctaaggagtaccttgaggcaaaagaaaaggaaaaaggggatgattcacagcacgaaaaggagaaaggggatgattcagagcatggaaaggcatcaggtgaagatgaagcttgggggaaggaagtcccaagcttgaaaggtggtactatagaggattacaaggacaacaacgtggatgaagatcttaatgatgaggaagaatttgatgaatcagacaagtcacatcataatgaagctccagaatatagacacctaattgccattcatgctgggaagcctaaaggtggattagtggaatgcctcaaagtggatcctgaaaaagtgagacgtctaagtttaagtgagcaacagcttgaaaaggctgctataaattatggacaacaaattgtcaggtttactcagcggaatatactgagggtgtatccaaaaggtactcgcattgactcatcaaattataacccattaattgggtggatgcatggagctcagatggttgcatttaatatgcaggggtatgggagatctctttggttgatgcatggaatgttcagagccaatggagggtgcggttatgttaaaaaaccaaattttctattggagactggtccagatgacgaggtcttcaatcctaaagctaagttacctgtgaagactactttgaaggcaagggttttatgtcaatcagctgcctcattcaagtatctctagtttaatgttaacaattttcatacgcttcttattcttaggtgactgtatatatgggggaaggatggtactatgatttcaagcatacacactttgatcaatattcacctccagacttctacacaagagtggggattgctggagtccctaatgatactataatgaagagaactaaggcaatagaggataattggttacctacatggaatgaggcatttgagttccctctcactgttccggagttggccttgcttcgcatagaagttcacgagtatgacatgtctgagaaagatgactttggtggacaaacatgcctacctatctgggagcttagaagtggcattcgagcaattccactgcatagccaaaagggagataaatacaacactgtaaagcttctcatgcgctttgagtttattaataattgattctgtgcaatgtgcatccttctgctccccattattattattattattatgtacagtcattaagatgtgttagtagcaagagtttgtatgtagtagctggatgatatcgtgaattatgtgccccgttaaatgatgtaagaaaaaaaatgtgttgtgtattttgttttcttgaggagacttgttggtcttgtaaggcttgtcaatatatactacttatatatatatatataaacataaggaaattgttcgtgttttgtatgagaatactttttaagtcatctgtactcaaatgttggttttgatc

SEQ ID NO: 549 - DNA, 1061 bp, Glycine max
aacaacaacaacaataaaatcctctattttttgtttcagcttttgttctttcaattccaatttctacttgctttcagttttcaacataagagcttgactggttcgggttttgacacgaacatgtttgttgctatgtggcaacacaacagcaatggcggggaaagtggcaaaggcagcttatgatgcaaagatgctgaagcttctgaaagagtacagtcaggtgctggtggtttcatcagacaatgtgggttccaaccagcttcagggcatacggaggggacttaatgctgattcggtggtggtgatgggaaagaactccatgatgaaacgctctatcatcttggatgctcagaagactggcaacaaggccttccttaaccttgtcccccttcttgtgggaaatgtggcattaattttcaccaaaggtgacttgagggaagttagcgaacagattgccaagtacaaggttgttcaacctattctcatgtgccccaagtacacgtcatatgacacataccagaattgtacttatatgcaatctggacagatacctttgggcctcacgtgttgtaatcagcaatcttcgcaggcttctgagccttttcttgtatgctctaaattcttgccacaccaacattgtttcttgatgagatcaagacagttcttgatgacgagtatatggtctcctcttctccttttggctggtaacttgtgacgtggatgaagtatgctgatttggatcacatggtttatattactcttttccttgagcactattggctttcaaaatgtaattgtattcttctgtctcacgggatcatggaaaatgaaaatgatttagatcaaggtttctgatacaaggatctttaatttcccaggaattttatcctctttttgaataaggatatggcagcatatgtgttatctgcttgtttattaatttatctcataattactgttttttgtgaagggggctatcagcagcactactttcacatttttcagaaccttttactttattaggattggctcataaattgatgattttattatgttgattc

SEQ ID NO: 550 - DNA, 474 bp, Glycine max
atgtctatcatcccaaacttgttcggtggtagacgaagcaacgtcttcgacccattctctctggacgtatgggaccctttcgaggggtttcctttttccacaggtcacgtgccttcctctggtggggaaagcagtgccatagccaacactcgcgtggactggaaggagactccggcggctcacgtgttcaacgttgatcttcccgggttgaagaaggaggaagtgaaggttgaagttgaagatgggagggtgctgcagattagtggtgagaggaccaaagaacaagaacagaaagatgataggtggcaccgcgttgaaagaagcactgggaagttcatgaggaggttcaggcttcccgagaatgccaaaatggatcaggtcaaggctgctatggagaatggagtgctaactgttactgtgcccaaggaggaagacaagaaacctcaagtcaagtcaattcaaatatctgcctag

SEQ ID NO: 551 - DNA, 711 bp, Glycine max
agcattgtaagaaagcccttcatcagagataacttgacaaagaaaatcaccatgtctatcatcccaaacttgttcggtggtagacgaagcaacgtcttcgacccattctctctggacgtatgggaccctttcgaggggtttcctttttccacaggtcacgtgccttcctctggtggggaaagcagtgccatagccaacactcgcgtggactggaaggagactccggcggctcacgtgttcaacgttgatcttcccgggttgaagaaggaggaagtgaaggttgaagttgaagatgggagggtgctgcagattagtggtgagaggaccaaagaacaagaacagaaagatgataggtggcaccgcgttgaaagaagcactgggaagttcatgaggaggttcaggcttcccgagaatgccaaaatggatcaggtcaaggctgctatggagaatggagtgctaactgttactgtgcccaaggaggaagacaagaaacctcaagtcaagtcaattcaaatatctgcctagatctttaattggttgttgctgtctctcattccaaacaagtgtgttctgttctgtctttactgtatgttgttccatgtatgtgtttatgctgtgtgttgtgctttatgtcatttgtgatggtttaatactggggaagttgaaagttttccgttaaatgtatcaataaacttttattgctttatctcg

SEQ ID NO: 552 - DNA, 1603 bp, Glycine max
ttgcattttgctttctgcccataagaaactacatacagctttttctttcagcatattattctcttaacgttaacccttactcaaagagagaatactttgtgcacacactaattaacctccaatttgccataatttccaatggagagagcagagtcatcgattgaacaaattcagcctccaacttatggaaacctagtaactattcttagcatcgatgggggtgggattcggggcatcatccccgctaccattattggtttccttgaatcccagcttcaggagttggacggtccagaagcgaggcttgcagactattttgatgtgatatcaggaacaagcacaggaggtcttgtaactgctatgataactgctccagacaacaataatcgacctcttttcgctgccaaagatatcaagcctttttacatggaccactgtcctaaaattttcccacagcatagtggccttggtgggacgatattagcaaagatgataagatctctgggaggacccaaatacgacgggaaatacctgcatgaggtcgtgaaagagaaacttggagacattcggttgcatgagacactcaccaacgttgtcattcccactttcgacatcaagtctttgcaacccattattttctcatcttataagcttaagatatccccttgcatggatgctaaactctcagacatatgcatcagcacgtctgctgcacctacctatctccccgctcacaatttcaacaatcaagattcaaaaggaaacgtacacgaattcaacctcattgatggtggtgtttgtgcaaataacccgaccttagttgccatgaacgaagttacaaagcaaatcattatgcaaaatcctgatttctttccaattaagccaatggaatatggtcgcttcctaataatttcaataggcaccgggacagccaaaaatgaggaaaaattcaatgcacaaatggcagccaaatggggtttattggattggctaacccaaagtggtagtaatcctttaattgatgttttctcccaatccagttcagatatggtggattttcatttatctgctgtgactcaagcacttcattcagaagataattaccttcgaatacaggatgacacattgaccggaacagattcttcagttgacattgctacaaaggagaacttggagaagctttgccacgttggagaaaaactgttaaagaaaccagtctctaggatcaatttagagaatggtctctttgagccactaaaaaacagggaaaccaatgaagatgctcttaaaaggtttgcaaaaatactttcacaagaaaggagactccgtgaaatgagatccccacacactaaaaagacattctagtttatacaggccctttcgattaatccatcagcttgagtgatttaatcactgtttgtataatttgttgctctcacagaagacaaatctgtgaaatattttagtagaacttgtttaagattgatgtcaaaaattgaattgcttattgataaaaatgtaactttaggggctagtttgttatattttttattttttacttagattctctgcaccagtagtaaatcaagtgagttaatataga

SEQ ID NO: 553 - DNA, 2219 bp, Glycine max
aaagaagaggaagaaaccttagcagctttcggcgctctttttctttaatctctaatctattttccttttcccttcttcccttccaatttttcccatatcatattcaattctgtgtctctatgacacactagtacttgttgttttgtgtacccattattacccacacaccccaaatacaaattatattctaatccattattttatattactattaccttaaactaaacaaaaataagttattgttgttgttgttatgtttttatatactggagtgatgtatctccctggtttctactctctatgcaatgaacaaagcaactgaaattgttgctttttagcttcaacaatctctcatccaacgcatcagccaaatctagtggcatatctcagccttcactttcacaacactgccaaaaaaaaagaagtagaaaaaaagaaaccctttacttctttttagttttttgttaggtgaaatcaagcccactaatgtgtgtacgcattagagaagggcattgaaacaaagtgtgatttctggtggagcttgattagtcatcttctatgctgtcttttgtaacagaaaacatgggcttactctgtagcagaaatcgccggtataatgatgctgatgctgaagaaagtgcacagactgcagagattgaaagaagaatagaattagaaacgaaggctgaaaagcatattcagaaacttctactacttggagctggagagtcagggaagtccacaatatttaagcagataaaacttttgtttcaaactggctttgacgaggcagaactaaaaagctacttaccagtcattcatgctaatgtgtatcagacaataaaattactgcatgatggatcaaaggagtttgcccagaatgatgttgattcttcaaagtatgttatatccaatgaaaataaggaaattggggaaaagttatcagaaattggaggcaggctggattacccatatctcaccaaggagcttgcacaggaaattgagaatctgtggaaggatcctgcaattcaggagacatatgcccgtggtagtgagcttcaaattccagattgtactgattatttcatggaaaatttgcaaaggctgtctgacacaaattatgtgccaacaaaggaggatgttttgtatgcaagagtgcgtacctctggcgttgttgagatccagttcagccctgttggggaaagtaagaaaagtggtgaagtctatagactctttgatgttggcggccagagaaatgagaggagaaaatggatccatttgtttgaaggagtttcagctgtaatattctgtgctgcaattagcgagtatgatcagacactttttgaggatgaaaacagaaacagaatgaccgagactaaggaacttttcgagtggatcctgaagcaaccatgttttgagaaaacatccttcatgttattcttaaacaagtttgacatatttgagaagaagatcctgaaagtcccacttaatgtatgcgagtggttcaaagattaccaaccagtttcaacagggaaacaagaaattgagcatgcttatgagtttgtgaagaaaaaatttgaggagtcatatttccagagcactgctcctgatcgtgttgatcgcgtctttaagatctaccggaccactgcccttgatcagaaggttgtgaagaagactttcaagcttgttgatgagactttgaggcggagaaatctatttgaggctggcttgttatgagcagtgatgaaccatatatgttataaaaagggataacaatatttttacattgaagaggtgaccagattttgggtatactagggagtcaggtatactaaatattaaatcgatttgttgaatattatttcaagttaatcttgtggagaaagaaaagccttttcttggagttgatctccacatccatcttcaaagggcaaatttattactactagtctattactactcaagtttcaagatttgatatcatgatttgtgatcatgctttaatagattgaaaatcactaatcatatgatatatttcatatttcatactattagtgattatattttgcctcctagtggtcttgtgttgatgtgcatgcatcatgcatatgcatgcacacgtgtaaataatttggagatgtgccaagtgtcatgtgctggctttgtcgacttctgaattcagaccttataatttgcttttaatactcgtttcgaatatt

SEQ ID NO: 554 - DNA, 3895 bp, Glycine max
caccgtcggagccggtaagaaagaagcgcaactaaactaacgacaagtcaaatcgtacttctcctttcattaactatattttcttcacgatttcctgcaattacagacattagacatagccccgcattcgagggcaactcctctgtttaacttgtgagtcatttcatttccaaacgcatcttttcttcgctttgtttcttgcatagaggtcccatcttccaatcatgtgaattttagatatgcggaaatgttcagaattgcttgattttactgttgttcaattttaatgcctacatgatgatgaaatctaagtttgagtgtggaaaccaagatgctaatgttgatgatggagaaattaatatgaataatggtcaactgctactgcaagacattcaagaaataagcaaagctctttatgccccttctagaccttccttttcctcggtccataatcgatccaagtctgcgggaaaaaccggtttgtcgaaacctcaagttgccctaaccccgggatttctaaaggaagatctgttgcctaaggacaagaagttgtcttcagcgtggaattggaagaagcccatgaaagctttgacccattttggtggtcaaaagttcaaatgttgctttaaccttcatgtccactctattgagggccttcctttgagttttgatggcattaggttgtgtgtgcattggaaaaggaaaaccaacattttgcagacgtgcccggcaagggttttccagggtgttgtggagttcaatgaaactttgagtcatggatgctctgtttatgttagtcgcactgtgtctggtcactctgtcaagtatgagtctaagcgtttcttgatatatgcctctattgtaggagctcctgaacatgacataggaatccatcaggttgatctcacaaggcttttacctctgactttagcagagttagggggtgatagaagttcagggaaatggagcacaagttttaggttggcaggaaaagctgtaggagcgagcctaaatgttagtttcagctatcaagtaatgaaggatgagttaatggaatttggtggtgataatttgaatgttttcaaccttgttaatctgaagccaggcaggccaagcagcactagcagtgttatggattttagtcctatcccttttcattctgatgatatgattttatcctgtgaaacattgatgaattccagctcaagtctttccaaatcaatcagtttcctatatcaaaagcttgatgaagggaacattcataattcagcacgagcagactcagaacattttgaaccacttaaatcccatggttttacagaatcagagtcacctctagaatcaaatcaagatgaacctgatgactctgaattttccattattgaacaacaagtagaaacattggaaggggattccttggaacttgatcagacaggaaatcaaacagttgatttgtcaacagttgatattattaatgtggatgatattgttaaggaagatggcatatttgttgacaagaacacaagatttgatttgatggatagcatatgcactagttgtgtaaatgggactatggcagatgatggcaaacataaacgcagtagttcatgtgtcagtataacttgcatcaaggatgcagatatgcttcctgagacatcagattttattgaccaaggatgctaccttaatgttaaatcaaattataaatcacatagaatggcaaaaaaatcaagtagcttggattttatcactgaatctattgcaaatgatttcttaaacatgctggccatggagagcggttcatttggctcaagttgcaatggtgatcccctgtctcccagagagaagcttttaagacagtttgaagaagaggctctagtttctggtaacttcacttttgatttcaatgcaaatgaagaggaattggggacagatgcagttggagatagctatcaggattgtactgtggattcagatttgtctttatttattcaagctgctgaagaggagcatgcaagggagaatcacttattaatgcagagaaggaaggccaaaattcttgaagacctggagactgactcattaatgcaactgtggggcttaaatgagaaggattttgaaaattctcggggaacttgttcgggtggttttggaagtccaattgaactacccaatgaagaatcctccatattaccttcaattggacatggacttggttcatttgttcaaactatgggtggaggctttttgaggtccatgagtccttccctattcagaaatgctaaaaatcgtgggaacctcatcactcaggtttctaatccagttgttttacctgcaaaaatgggtaatgatatactggagatactgcagcatgtgacttatgatggagtggaagaactgtgtcatcatatctataaattaatgcctttgcaagatatcaccgggaaatccattgagcatattgtgcagaaagccacagccaatgaaagggcttctgtaaggcaggggtcatggcagcatgatttgtttgaagaatttccatgtggttatttaacagaggaaggcatgagcttggacagtgtgtctcttgaagctataggtcccatgactgttaataagattgaagcccttttgatcgaagggttgagaatacagtctggtatgttgtatgaggaggcaccatcatatatccatccccaacatgcaaagatgcctgctgttggaagcagaagaaccaactggaggggatttcccacatcagagagaattgctaaattgcaactagaagattgtggagaaactggcaatgataatgatggactaatggggctgtcaataacatttgatcagtggttgagattggattctggcattattgaaggagatcagaattcagagcaaattttgaagatccttgaagtacaccattctaaaatcacagagttagatgaattgaaacatgccattgactggttaaaatcatatggaagaaagctcggacattatggactcttagggaaccacctaacagtggcttttatgatccagctcagagatcctctacgaaattatgagccagttggtgttccaatgctggttctgactcaggtggaaagagtttgcatatgtgctacaccggaagatgacttcaattttcttgatgaaaaggaaaaaggaatggacaatggggccctgccaaatgagacaagtagcaagagtatggaagatacaaatactgatgacgaagccactaaatttagatttaaaatcaaagagattcatctttcaggagtccttagcaaagccggaagcaagcaatgttggggtactgcaactcagcaacagtctggtatccggtggttgcttgccagcggcataaccagtactgccaaacattcctcttcaacatcaaaggcaattgtattatcatccccactgtttgccaagacgttgctgaatgaggatatcctgtggagcatttcttgtgttaatagtatcatggggactaatagtagagagctgccagctgaaaatgtacacattcggaacccagatatcatcttcccaagttgaactgttagataatttcttacgtgcagttttagccattttttttaaatttctccatgtagatagttactatagtatgttgtcaagaagttatacgagtcagcttgcccaaatttttaaaatgtatgttaaaatttctggccttctcggaagcgaccctttcttctttcaatcacctatacacagtttggctgttttgttttctttgatgtgcaactgctaatgctgcttgcaattaataaaatgtaattgattatgtctaaattattgtgcatttacttttcaattgtcatggccaacttatttgtatataaaaaatttctta

SEQ ID NO: 555 - DNA, 849 bp, Glycine max
atggaatacgtggatacttcactcaatcttaacgttgatccttcttctatgcacatggatggagttttggtggaagagttgcgtcgtctaagttgtgagaacaagaggttgaccgggatgttgacccacttgtgtgagaactacaaggctctgcaaaagcaactgagccaattgatcaacacgaattttgagcaattagacccaattgaatcacgcaagagaaaagccgagagtgatcaatggtgtaccaacaaatttattggtgttaataatgctgaatgcagctccatcaccgaggattcattcagaaagtacaaggacttcaactcctcccctaaggtttccaaagttcttgtcaagactgaagcatcaaataatagcttatatgtgatggacggatatcaatggaggaaatatggtcagaaggtcactagggataacccttctcctagggcttacttcaggtgctcctctgccccaagttgccccgtgaaaaagaaggtgcaaaggagtttagaggaccctacaatacttgttacaacgtatgaaggagagcataaccatggtcatcaaagagctgaaatatcacttgtctcaaaccaaagagaagcccctccaaaagggtcaagtcctgtttcctcacctacacccacaattcgaagtgctgcttgccccaccgtaacgtttgatttggtcaagtcaggtttggttgaacttgaaagtgcccaaaagtcatctatccagcaatttttggttcaacaaatggctacttctttgacaagggataccaatttcacaacagcacttgccactgccatttcaggaaaaattctagaggcccaatggtga

SEQ ID NO: 556 - DNA, 1205 bp, Glycine max
catcccccacttcagcccccaaaaacatttcattttctcttacaagaatcttcaaatatggaatacgtggatacttcactcaatcttaacgttgatccttcttctatgcacatggatggagttttggtggaagagttgcgtcgtctaagttgtgagaacaagaggttgaccgggatgttgacccacttgtgtgagaactacaaggctctgcaaaagcaactgagccaattgatcaacacgaattttgagcaattagacccaattgaatcacgcaagagaaaagccgagagtgatcaatggtgtaccaacaaatttattggtgttaataatgctgaatgcagctccatcaccgaggattcattcagaaagtacaaggacttcaactcctcccctaaggtttccaaagttcttgtcaagactgaagcatcaaataatagcttatatgtgatggacggatatcaatggaggaaatatggtcagaaggtcactagggataacccttctcctagggcttacttcaggtgctcctctgccccaagttgccccgtgaaaaagaaggtgcaaaggagtttagaggaccctacaatacttgttacaacgtatgaaggagagcataaccatggtcatcaaagagctgaaatatcacttgtctcaaaccaaagagaagcccctccaaaagggtcaagtcctgtttcctcacctacacccacaattcgaagtgctgcttgccccaccgtaacgtttgatttggtcaagtcaggtttggttgaacttgaaagtgcccaaaagtcatctatccagcaatttttggttcaacaaatggctacttctttgacaagggataccaatttcacaacagcacttgccactgccatttcaggaaaaattctagaggcccaatggtgaattaaacacaaacattattaggaacatgttatcaattttaaaaaataatctctccttttttttaattaccagaaagattataaaaagagattattttcttaaaataagttcaatcacgtatatactcgctgcaccgaacagggattgtattagtttgcttgcttcttttagaggggccgaagagacaaatagttggaatgtatatagaaaattaaagtgaaaaagaaaaattatatttccttttatgaaatagtacaagacggaaatgactagaccaaactagtataagggtgcttgct

SEQ ID NO: 557 - DNA, 1450 bp, Glycine max
gcatctcagcatctatatctatccacacacaacacacacctctgcctctactccgcacaactcctcacacacaaaacacaacacacgctcatgttgttgatgagtggaggcaacaaaaaacatatatccatcactcacaagaccaattgacctttgttcttggtacaattcgattcaaatttttcgcactaaggagagccactcaaggctctgggatgtactatacgccgttcggggttctgattttcggcggcgagaaggttcaagagacacagtgggagaaggagcgataagtaattcatattcctaccttcacacacaaaaacaacattctcaccatttttagatccttccattatctctcgtaggatcttccaatttcaattttaattcaatcccttcagatttttcggagagaccatggctgggaaggttttgaaagaaacgaaatcgctgtcggcggcggaggtggcgggggcggaggctgagatgacggtgtcgtcggtgaagtgctgctgctgtgggctgatggaggagtgcacgcacgcgtacattgggcgcgtgagagatcgctacgggggtcgttggatatgtggcctctgttcggaggctgtgaaggaagagagggagagagagaagattgtgatatcaacggacgaggctctgaagcgacacatggggttctgccaacagttcaagtcttctggtcctccagataacaccaacgaggacttcattctggcagtgaagcagatcctgtttcgcactttggattctccgaggaaagaccgtttcacttgtcgaccacttgggagatctcacagttgtttctcaaccatgcaaggaactcccacacaggcggagacagaatgatccctctttgaataagattatctttggtacaagatatttgtgatctatgaaagagaagagtgatccttcccatattcattagcaaaacttgatacatttctttaagtggttatagtactattctgtgttagaattgaaattttactttgatagcaaaattatcaaggtgaaactttaattttaaacaggtataatactaaaaacacttcaggagttatattgaagtattgtaggataaatattagaatgcaactaaaatggagacttattgattaataattgataataataataataataataataataataataaacaatgtatagtcatgattcacaagcatcgtatctgtgagtcaaggttgagttactaagctcagttgtgtgtcttgtttttgttgtgttgtggttagtcaggcaggaatggttgagttatggtgttgagttgttgattgtttttgtttgacatttgggattgagtggatgattgttgacaggagtcttccttccttgacttcaatctaaatgtcacttttgtttactagtaatggaatttcggaatttctatggttggccc

SEQ ID NO: 558 - DNA, 2109 bp, Glycine max
atagaaacagaatcacaaggcaagaaccaagtcgtgttaatttccattcatatcattggtttcatttcccttcatttttattcttctctttgtttctttttccaactagctactggtccagctgtttattacatttcacccttctttatattatttgttggaaactgaaatcaggaagaagaaaaaaattgatctcagacctgttagtgttagatttagattccaatcatgtctaccagatagaagtcaaagaacaaatttttggaggattttctttcatgctgattgaaaatctgaaatctttgctgtgaagggtgattcaaaggtgtgataatggaggaggaaaatcaggaagatccatgtagtgaatctatggaggaagatgaatccaaaaggggggtttgggactgtttttgcatcccaataaattggtttagcatgctttctagggaaatgcattggagctttgtgtttggggtggtggttgtttatggaataagccagggacttggtggagctcttgctgaagttgggactaagtattacatgaaagatgttcagaaggtgcagccatctgaggcacagatttataaaggaatcacatccattccttggattgtgaagcctctttggggtcttctcactgatgttctcccatttttcgggtatcgcaggagaccttacttcatttttgctggtttcataggagtgattgccatgcttttgttatctttgcatgaaaacctgcatcttgtgttggcccttttggcattaacagctgggagtgctgggggggcaatagcagatgtgaccattgatgcctgtgtggcacagaacagtatctctcaaccctcacttgctgctgacatgcaaagtttatgtgccttcagtttatctgttggatcactaattggttacttcattagtgggggtgtttggtctgatgactatcccagctggacttgtaatttcggttggttttctgctttatgagcctcgtatgcacaacacatcttacacacaggtgaaacaaaattttattgatgctggcaaggctatgtggactacattgaggagtgaagatgtatgggggccttgtttatacatgtatttatcccttgcattgagtttggatattcgtgaaggaatgttttattggtatacagactcaaagggtggaccatctttctctcaggagagtgttggttttatattttcaattagttctgtgggggctcttttaggtgcaatactataccagtatgctctaaaggattatgcattcaggaacttgctattctggactcagttgatttatggcttgtcagggatgcttgatctgattctggtctcgagattgaaccttaagtttggcataccagattatttctttgttgtgattgttgaaagcatagctaaaatgactaataggctcaagtggatgcctatgcttgtgcttagctcaaagctttgtccctcaggtattgaaggcactttttttgctctcctaatgtcaattgataatgttggacttctctcagcatcatggggtggtggctttgttctccacatgctcaggatcacaagaacaaagtttgataacatttggttggcgattttgatccgcaacattttaaggattgctccactttggctcctgtttttggtgcctagagctgaccgcagctcttcaattcttccatgtaaaagcatgaattcagaggtggctatcgacccttcagacaccaaaaatgttgaattggtgtcccttgtacacagtgttgatggtaaatagtggaatgaaaagacattcttttggattctcaattccaaatacacgaaattaccaagccagtgtagaattaaacgtgcaatttgtttggatttaatgtggaaaaaaaataagatgattttgagaggacagatctgtgtagcttatgtagtttgagggtgaagggacatccaagcaagagggattccctaatgaatattaatcggtggtgggatatttatgtaaagtaagcccttggtatatctttatgcgtcgatctcaataattttggttaggaaacaaaactgaaaatcaaattttatagatatttgttattt

SEQ ID NO: 559 - DNA, 1407 bp, Glycine max
ttctctcactttctgggtgcaacatttttttttctgtttctccgagattccatcgcaaaggttgtttctttgactccactctctctctctctctctatcaagtttgtttctctgacacaacactttctctctctaactctttaaatttttggaaacctactctctctatactgctgctgaattttaatttttttggattgaactctgcagggagtcaagaatgtctaaagaagttattgctactcaatcacctactccttttgagtatgagatcttggatagtgatgctgaagtccttagaactgttagagcctcatccaattgtgctaatccatggattgaacctgaaaggttgaaacttagacatagaattggccgaggcccctttggtgatgtctggctagcaactcatcatcagtcaactgaagattttgatgagtaccatgaagttgctgctaagatgttgcatccaatcagagaggatcatgtgaagattgtattagagaagttcaatgaattgtattttaagtgccaaggagttgctagcgtttcctggctacatggaatttcagtcttaaatgggaggatatgcatcattatgaatttgtgtgagggttcaattggtgacaagatggcaggactcaaagaaggaaggatttcattgaatgatgtcttaaggtatggaatcaatctagctcaaggtgttcaggaacttcactctaaaggcagcttcatcctgaaccttaaaccttttaatgttcttctcaatgataatgatcaagcaattttgggagatgttggtattcctagccttttgcttggctcatcattcctgagctcagacatggctaagaggcttggaactccaaattacatggctccagagcaatgggaaccagaggtcagaggtcctatatcctttgaaacagattcttggggatttgggtgcaccattgtcgaaatgttgactggtaaccaaccttggtatggatgtcctgttcgcagaatataccagtcagttgttgaaaaacatgaaaaaccaaatattccaagtggccttccttcttcagttgagaatatcctcagtggatgctttgagtatgatttgaggaatcgcccgttaatggtagatattctgagtgtctttcaaaggggcagaggtaggataaaaatggaggaagaaaaagtaggtgaattcagttggttagtcagttagttttgggtgggagagaccacgctttcaaattcctgcagaagacaccattgtacgtcattcttgctcttactgattctggataacggttgatcaagagttggaggagtatagtcaataaaatttccttcctgtctttctactagtctctatgttctgtgccagccagcatctatcatactccaacaaaacaa

SEQ ID NO: 560 - DNA, 1578 bp, Glycine max
atggcattggaagtgcttgaagcgctggattcagcgcgcacgcaatggtaccacgtgaccgccattgtaatagcgggcatgggcttcttcactgacgcctacgaccttttctgtatctccacggtttcgaaacttttgggacgattgtactacttcgacccgagcaccccgaatctccccgggaagctcccgctgagcgtcaacaacatggttaccggcgtcgcgattgtcggaaccctcacaggccagctcatcttcggctggctcggagacaagcttggccggaaaaaagtgtatggtatcaccctcatcctgatggtgatctgcgccatttgctctggactatcgttcggggcaacgccgaagtccgtcatggggacgctctgcttcttccgcttctggctgggcttcggcatcggcggagactacccgctctccgccaccatcatgtcggagtacgccaacaagaggacacgtggcgcgttcatagcggccgtgttcgccatgcagggcgtgggaatcattttcgcaggtttggtctccatgaccctctcagcaatcttcaagcactactaccctgctccagcgtacatcaacgaccctgtcttgtccacgcaacccgagggtgaccttttgtggcggctggttctgatgatcggcgctgtgccagcgatgatgacttactactggcgaatgaagatgccggagacggggcgttacactgccatcatcgaagggaacgccaagcaagccgcggcggacatggcaaaagtcttggacatagagatccaggcggagcaggacaagttggctgagttcaatgctagcaataactacccactgtggtcgaacgagttcttccagcggcacgggcgccacttgataggaaccatgagttcatggtttttgttagatattgcgttctacagccagaacctgacgcagaaggatattttccctgcgattgggctcatagacaaagactatcaaatggacgctattaaggaagtgttcgagacatcacgtgcgatgttcgtgatcgcgttgctgggaacgttcccggggtactggttcaccgttttcttcatcgagaagatcggaagatacaagatccaactcatcgggttcttcatgatgtcgttcttcatgtttgtcattggggtgaagtacgattacctcaagaacgagggcaaaggctacttcgctcttttgtatgggttgacgttcttctttgctaactttggccccaacagcaccacgtttgtgctgcccgccgagcttttcccgacgcgcgtgaggagcacgtgccacgcactcagtgctgccgcgggaaaagccggggcccttgtgggagtgtttgggatacaatgtttaactgtgggcggcgaatcgtacaagattaagaaggtaatgattattctggcggtgacgaacttgttagggttcttctcttcgttcttggttactgagacgaagggacggtcgttggaagagatttctggggaggatgggagagagagtgaactcacaccgacgcccaataatagggttcagggatcaaggactgagacgatgtga

SEQ ID NO: 561 - DNA, 2666 bp, Glycine max
attgaacccttccccattccgagaaccgaacaaaatggaggaagaggcggaagagagaatcctacaaacgcaaccagaagcgtcacggcgacgacgacgactccgacgatgacaacgagcccgacgacgatgactccgacgaccaattccgcagccctagcgcccaaatcgcggacccgcggcgcgtggatatcgaggtcgtgtcgcccgagggggtccagatttcgcggttcccgccggcgatcaggcgcgaggtgacccgcccccacgcggtggtcgtggcaatcgcagcgctggaggtcggcgacgacaaatcacatcacaacaacgttccggttctggagaatgtgtcgcacggccagctccaggtgctgtcggcggtgtccaccgattgcctcggcggcggctcgagcttcgtcgttgctccaccgccagtttcgaaaggctccggcgtggttaagcggttcgggagtagggttcttgttgttcctatgcattcagattggttttctccagcctcagtgcatcgacttgagagacaagcagtgcctcatttcttctcaggaaagttgccagatcatacaccagataagtatgtggaatgtaggaactacattgttgcaagatacatggaagagccagggaagaggattacagtctctagttgccagggattgttggttggtgttggtaatgaagatttaactcgaattgtcaggttccttgatcactggggaattatcaattactgtgctcagggcccaagttgtgagaattcggacaatgagacttacctgaaggaggacacaagtggtgcaatatgtgtgccatcaacagctttaagatccatagatagtttggttgaatttgacaggcccaagtgtaaattcaaagcagatgaaatttattcatctcgaacaatgcacaatactgatatttctgatttggatgacagaataagagagcatctatctgaaaaccattgccattattgttctcgttctcttcctattgtatactaccaatcacaaaaagaggttgatattttactctgcactgattgctttcatgatgggagatttgtcactggtcattctagtatagattttataagggtggattcaactacagattatggtgatctagatggggatagttggactgatcaagagactttgctgctgcttgaagcagtggaggtttacaatgagaattggaatgaaattgctgagcatgttggcaccaagtcgaaagcgcaatgcattcttcattttctccgtttacctgtagaagatggaaagttggaaaatatcaatgtttcaagtttgtctttgttatccaatgtgaagaatcaagaggatattggaagattgcattgtttctcaaatggagattcttcaggacctgtgcataacagccaagattctgatggcaggcttcctttcacaaattctggaaatccagttatggcactggttgcctttttagcctctgctgttggaccaagagtagctgcaacttgtgctcatgcagctttagcttcattgtcagggaataattctgggagcacggcacatatagaagcagtggaaaatgataatcggacaaattcagaaagtatacataatagagatggtggccatgatggagaggttgcaaattcaaatcagaaaaataaggacatgtcaaaagtacttggttcatgtggtcaacatgagggagggtcaatcctcctatctgctgagaaagtcaaagatgctgccaaagcaggcctatccgctgcagcaatgaaagctaaattgtttgctgatcatgaagagcgagaaattcagaggctatgtgctaatattgttaataataagttgaaaagattggaactgaagctgaagcagtttgcagaaattgaaacacagctgatgagagaatgtgaacaagttgagaaggtgaggcagaggttggcttctgaacggtcccatattatatcaactcgtctgggaaatggtggaaccactccaatgaatatagcaggtgttggtccatccacgattaacaataatagcaatggtaggcaacaaatgatttccgcttcttcctcacagcctagcatctcagggtatggcaatagccaacgagttcatccacacatgtccttcgtcccacggccttcagtgtttgggttggggcaaaggttgccactttctatgatacaacaaccacaatcaacttcttcaaatccgatggtcaatggccccagtaatttgcagccttctcccaatcattcgatgtcgaggccggtgtcaaggactaactctgatttaggttaattaggaactcaatggtagttttgaaatatctacattacaattttagttggtcattgttttcagcagtcaagagtagtgtcaagaaatttgtttgtttaggttttagggcctgtgattggtttcagtagactatgaaaatgttgcttaaaaggaaataagtagcatttgattttccaaaagttatcgtgtctttcctattgctttgcgctttagggaacatgggaagtttattgtcatcaaagcaaacaaatttcaagttagttttacacaaacaattaacatcgaaaaatcatgatctggtctcagttactttttgtctccactgtctttgctgttgtaaaa

SEQ ID NO: 562 - DNA, 2304 bp, Glycine max
atggctgaaccatcatctgatgctgctactgcaagtgaaacgaagaaaaataaggcagacccaggctggaaatattgccattcactagtggaaggagatacaaacaccattgtttgtaatttctgtggaaaaatcactaagggaggaataacccgagccaaacaacacctgattgggaagtcgggcaacgttgcagcttgcaagaaaactcccccaaatacaaagtgtgggactaaaaaaggaccaatggacaaattctgtaagaatccagaaaatgcaatcaatcggagaaaaatggagatgctgaggcaaatgaacataagagagtcaatggataagaatgaagtattgaaggtgcatcaacatattgctcgcttttggtaccaagcaggtttgtcattcaacctcattaaattgaaaagctttgagaacatggttgcagccattggtcaatatgggccacatttgcccattcctagctatcatgacatcagagttccactcttgaagaagaaagttgaatatactgaaaatttgatgaaaggccatagggagcaatgggtcaagtatggttgtactattatgtccgatgcatggactgatcggaaacaaagatgcatcattaattttttgattaactctcaagctggtaccatgtttttgaagtctgttgatggctctgattttgtaaagacaggtgaaaagctttttgagttgcttgatgccattgtggaggaagttggagaagagaatgttgttcaagttgtaaccgataatgggagcaactatgttttagcgggtaagttgttggaggagaaaaggaaacatatttattggactccttgtgcagctcattgtattgatttgatgcttgaagatattgggaagcatcccttgataaggaagacaattagaagggcaattaatctagttgggtttatctatgcccattctagtaccttaagtttgttgagaaattttacaaacaagagggaattggtgagacatgctattactagatttgccacttcttatctaaccttggaaaggcttcacaaagagaaagccaatattagaaaaatctttacttctgatgaatggaccttgaacaagctatctaaggagcctaagggaaaagaagctgcaaaggtagtgctcatgccttctttttggaatagtgtggtttacactcttaaagtcatggctccacttgtgaaagtgcttcgtcttgtggatggtgaaaggaaaccagccatgggctatatttatgaagcaatggacaaggcaaaagaaacaattatcaagtctttcaacaacaatgaaagcaagtacaaagatgtgtttgaaatcattgataaaagatggaattgtcagcttcataggccattgcatgcagctgcccacttcttaaatccagagttcttttatgacaacactgacttagagtttgattttgaggtcaccaatggtttgtttgagtgcattaagaagttgattccacaatttgatgtgcaacagaaaattctaaccgagttgcatctttacaagattggtgctgaccacttaaaggaaaacccattctcctatgttataattcagaattctaagttatgctcttggttggtaattggtattgcagcatattggtggcgaatgtttgggtcacaaactccaaatttgcagaagctggctattaagattttgagtttgacttgcagtgcttcaggatgtgaaagaaattggagtgtgtttgagcaaattcattccaaaaaaagaaagaggcttgagcacaagaggttgcatgatttggtgtttgtcaaatacaaccaacaattgaagcaaagatataatgcaagagatgaaattgatccaatttctcttaatgatattgatgtatgcaatgaatggctcgtgggagagatggatcaagatgatgataatgatgctggaaatgatttggtatttgaagatgatgatgctctaaattgggcaactgtgtatcaggcttcgggggttggagagtgtaggatgtatactaggcggaaaaaacaaaaaacaagtgttgctgctgcccaaactactaaaaaacaggcaatggttgttggatcttcatcaaggaagcaaaaagcagtccaagaaaatgatgaggatctagatgttgaggagaatattgatgttgaatctgaagaagaagaaatcatggtcaattttgaggcgtctgatggggaagagggagagggagatgctccattaccatatgataacaacgaagatgattatgttgggattggagaagatgattag

SEQ ID NO: 563 - DNA, 618 bp, Glycine max
atggcttcctctgttgctttagttttgggtctatgtctagcactcaacatggttctgccgacacgtgcagctacccacacagtgggagacacctcaggttgggcactcggtgctgattacagtacatgggccagtggcttgaaattgaaagtcggagatagtcttgttttcaattatggggctggtcacacagtggacgaagtgaaagaaagtgattacaagagctgcaccacaggcaattcactaagcacagacagcagtggcaccaccacaatcaccctcaagactgccggcactcactacttcatatgtgcttctcctggccattgtgatggtggtatgaagcttgctgttaaagtaaaggctaaaaaagcatctgctcctgctacagcaccttcaccagctgcaaaggactcaccttctgattctgatgacaccaaagacacacccacttccacctccactaaccctaaaacttcaacctccaccaccccttcaactgaaacctccaccactaccacatcttcttatacatcatctgcaactgctgctggctccccaattgttgctatgttttttgcttctttgatcccatactttgtgttgcgtttgatgtga

SEQ ID NO: 564 - DNA, 2070 bp, Glycine max
atggcttcgaattccgagctggtgcgaaccgttgtggagtcagtgctgggcgtttcggtctccgattcggtgatggtgatcgcggccacttccgtcgccttggtgatcgggcttctcgttttcgtgtggaggaaatcttcggatcggagcaaggagcagaagccgctcgcggtgccgaagttgctggtgaaggaagaagaagaagacgaagtcgatgctggttcggggaagacccgagttgccattttcttcggaactcaaactggtaccgctgagggctttgccaaggctttggcagaggagatcaaggctaggtatgaaaaagcagctgtcaaagttgctgacctggatgactatgcaatggatgatgatcaatatgaagagaagctgaagaaagagtcacttgcatttttcatgttggcaacatatggagatggagagccaactgacaatgctgcaagattctacaaatggtttactgagggtaaagacgagaggggtatctggcttcaacagctcacgtatggtgtttttggcttaggtaaccggcaatatgaacattttaataagataggtaaaatagttgatgaagaacttagtgagcaaggtgcaaagcgtcttgttccattgggactaggtgatgacgatcaatccattgaggatgattttgttgcttggaaggaatctctatggtctgagttggatcagttgctccgggatgaggatgatgtaaatactgtatctactccttataaggctgctattcctgaatatcgagtggttattcatgattccaccgtcacatcttgcaatgataatcacttaaatgtggcaaatggtaatgctgtgtttgatattcaccatccttgcagggttaatattgccgctcaaagagaacttcacaaacctgagtctgatcgttcttgcatacatttggagtttgacatatccgggactggcataatatatgaaactggtgaccatgtgggtgtttttgctgaaaacggcgatgaaactgttgaagaagctggaaagttgctgggtcaggatttagatttggtattttccattcacactaataatgaggatggtactcctctaggaagttctctgccacctccttttcctggcccttgcacactgcgctttgctttggcacattatgcagatctcttgaatcccccacgcaaggcttctttagtggctctggctgcacatacttcggaacccagtgaagcagatagattaacattcctctcatctcctcaggggaaggatgagtactccaaatggctggtgggaagtcagagaagtctccttgaggtaatggctgagtttccgtcagcaaaaccaccgcttggtgtgttttttgctgcagtagcccctcacttacaacctcgttattattctatttcatcctcgcctaggttttccccgcaaaaggtgcatgtaacttgtgccttggtatgtggtccaactcctactggaagaattcacaaaggagtatgttcaacctggatgaagaatgccattcccttagagaaaagccgtgactgtagttgggctcctatttttatcagaacatcaaacttcaagttaccagctgatcattccattcctattattatggttggtcctggtacaggcctggcacctttcaggggatttttacaggaaagattggccctcaaagaggatgccgttcaacttggtcctgcattactcttctttggatgtaggaatcgacaaatggattttatttatgaggatgagctaaagaattttatggaacaaggtgctctgtcagagttgatagtcacattctcgagagagggacctgaaaaggagtatgttcaacacaagatgatggataaagctgcaaatctgtggaatttgatttctcagggaggttatctttatgtttgtggtgatgctaagggcatggcccgagatgttcatcggactcttcataccattgtccagcagcaggaaaatgtggactcttcaaaggcagaggctatagttaaaaaactccagatggatggacgttatcttagagatgtctggtaa

SEQ ID NO: 565 - DNA, 1825 bp, Glycine max
tttataaacacctcacccctctgtctcaaacgcatacaacaccacacacagatcaattgcaacggttgaattttgactgaagacaaagttagaaaaaaaaaacatgtcttgctccgtcgcggtttccaattcgccggtgttctctccttcttcttccctcttctgctcgaagccctccatcatctcttcttcgccggaatccctctccctctctctgtcgcatctcaaaccttcgaactcttctacgtcgtcgtcttgttcttcgccttctgctgctgctgcttcttcttctccttcttctccgtttcgacttcgccttcccaagcctcccaccgcgttctccgcgtcttctgctgcttctgcttcgtctacctctccgaactgcaccgttttgaagaggaagcgacccgctaggttggacatacccgtttcctccctcacctttgcggttccgcccacgccctccgtggcggcgcgtgacgtggttgaggctgaggaagatgggtttggggtgtcctgcaagagagggaggagggagtatatggaggatcgttacacagctggggataatcttcgcggagaacacaaactggctttttttggcatatttgatgggcacggtggtgcaaaagctgctgaatttgctgcaagtaacttagaaaagaatgtgttagatgaagtaatcgtgagagatgaagataatgttgaggaggcagtgaagcgagggtacctaaacaccgattcggatttcctaaaggaggatcttcatggtggctcttgctgtgtgacagcattgattaggaatggtaacctcattgtgtccaacgctggtgattgccgcgctgtcattagcagagggggtgttgctgaggctctaacatctgatcacaggccttcaagggaagatgaaagggacagaattgagaacctgggtggctatgttgatttatgccgtggtgtttggaggatccagggatctcttgctgtgtctaggggaattggagatagacacctgaaacaatgggtgacagcagagcctgagaccaaagttctcagaattgaacctgaacatgacttgttaatcttagcttcagatggattatgggataaggtatagaacttgaccatttcacttcaatgttaatagtgtctttttaagtattttttaatattgttgctcatgcattggactgagtcactaaacaagtttgtttctcattctcatttcaggttagtaatcaggaagcagtagatactgctcgttcttttctcgtaggcaacaacaaatcacaaccattgctgctggcttgtaaaaagcttgtagatttgtctgtttcacgaggctctttggatgacacaagtgttatgctaatcaaattggagcactatatttaaagttaccttagtacaacagaaggggaggtagtgcataaggttttagattattgcagttgagatcgcattgaggttaagattgcgttgcagtttgcgactttgaacagccttggtggtgcctgatggataagagtagctgattcttttctgtatatataaatctgactacattattggaatttttttgtacccgcataggggagagggggatattaacaataacatttagtaattatttttttcattgaataatttatgtaatgagcagcatacaattaattaatttatacattatttatttagtaattcatttatctttttacattgaaattttctcatttgtgatggattacagtttccccccttttgagtacataaatgcaaaaaaatgtagaatgattcaatcaatgaatctctcaatttatcagcc

SEQ ID NO: 566 - DNA, 561 bp, Glycine max
atgaaagggaaagcattgggtgtctttaaatccaagcttctcaggccatgcaaaaaactatttttgttctttagacttaggtccaagaaacctgtgtttataagagctctcaagttccgtgctcacaagtccactttccctaaggcctctttcccaagaaaaccaacaatgccctctttgttgcaatccatgtttcgttctccaaagaaatctaagcacgcagacatgctgcaaggactcaggagtccctcaaatgtgcatgaaactccactctttccatcgccgcttaccccggcttttgtaacggctcgtgaggtggagaagagggaggaggctttgaggcaagaggtggaagatgcatgcaggagttttgagaactatttggtggagatgattgtggaagaagggaagaccagggacctgatggatgtggaggaacttctatactgttggaagaacctcaagtgtcctgtgttcattgatttagttagtagattttatggagagctttgtaaggacttgttttctccggatagtgaggaaggtgacagttccaagtga

SEQ ID NO: 567 - DNA, 2004 bp, Glycine max
tgaatcatatctattttgcatcagtcccatatagctagaaattaaagactatacatcagaagatggataacattccaaaatgcgaagcaaattatagccctctcagtcctgtaactttcttgaccaggtgtgccaaatgctatggcaatcgtatctctatcatccatgaaggaatccgcttcacatggcaacaaacttatgagcgttgctgccgccttgcctcctctatacgctccctcaatcttgcaaagaatgatgttgtatccgtgttggcccctaacattcctgcaatgtatgagatgcattttgcagtgccaatggcaggtggagtgctcaacaccattaacacccgtttggatgcaaataatatagccaccattttacttcactctgaagcaaaagtcttgtttgtggactatgagtatgtacccaaggcaaaggaaaccttagaattgctaatgggcaaaaaatgtcattcatctaccccactactcattctcattgatgacataaactcacccaccggcttacaatttggtgagttagaatatgagcaattggtctataatggtgatccaacctttgttccagagaaaatccatgatgagtgggccccaattgctttgaactacacatcaggaacaacctcagcacccaaaggagtagtttacagccatagaggtgcataccttagtacccttagccttatactaggttggaaaatgggtactgaaccagtgtatctttggacattaccaatgttccattgtaatgggtggactttcacatggggtgtggctgcacgtggtggaactaatgtttgccttagaaatatttcagcctataacatatacaagaacatatctttgcatcatgtgacacacatgtgttgtgctcctattgtctttaacatcattctagaagccaagccaagtgagcgtattgaaatcaaatccagtgtggaaatactcactggtggagcaccaccaccaccttcgttgattgagaagattgagtctcttggatttcatgtcatgcatgcatacgggtcaacagaagcaactggaccagcgttggtgtgtgagtggcaacaacaatggaatcagctcccaaaagttgaacaagctcaattgaaagctcgtcaaggaattagtatattgacacttgaagatgttgatgtgatcaatgtggacacaatggaaagtgtgccaagagatgggaagacaatgggagagattgtgttaaggggaagtagcataatgaaggggtatttgaaagatcctgagtcaacctcaaaagccttttgtgatgggtggtttcacactggggatgttggggttgtacacaaagatggttatttggaaataaaggatagatccaaagatgtgattatttcaggaggggaaaatattagtagtgtggagttggaatctgtgctttataagcacccaagggtgttggaggctgcagtggtggcaatgccacacccaagatggggggagagtccatgtgcatttgttgtgttgaagaaatttgaaggtaataataaaacgaatgatgtgactgaggctgacattattggatattgtaggaagaatatgcctccctttatggttcccaagttggttaagtttgtggaggatttgccaaagacttcaaccggtaagattaagaaatttgaattaagggacaaggtcaagaataccgtgtctcgtctttaataatatgtatctgttcaagatatacttttgtaattgcataatattttatttttcagtttttaagataggatttagtaaataagttgatttcttatattttaggagtaaggcaattttaatggattagcctagtcaataagtgattcctatctttaaggagcaagttagttttaatattttgttttgctaatatcttgttatctaattagtttatcttttgctatttattgtatcgttgttgagaataatttgaattagaataaaataattttatttcctccac

SEQ ID NO: 568 - DNA, 1484 bp, Glycine max
gataagagactttgtgattattaaaagtctggaactgtttgcattttttaattaaattagaaaaatgcaaaatacaaaattcaaaaagaaaagaaaaatataaggatagaggaactcaaatcagtttcataaaatgaagaatatgtcacgagtggagatgacgataaattgagagaatgatgtaagatatgatgcattgcagacattgatatgcgatattattatcgtgtttgtgtgtgggaagggggcatagaagatggatctgattctgagatttatttatttaagagattatctatcacttttggtgcatttgttttcaaaaaaagattgctccctctccattcttcaattcttctctgattaattttcaacttctcttagctcattcacccaccctctagctatccaaaatcaatagatacaattgttcagttttattattaatttatggaaattgaacagcaagccatgaaaatgatgaagtcgtctaggttcagacgaatctgtgtgttctgtgacaccagccatggcaagaaccccagctaccaacacgctgcaatccaactcgccaaacaacttgtggagaggaacatcgacttggtttatggaggagggagtattgggttgatgggtttaatctcacaagttgtgtttgatggtggacgccacgtgttaggggtcattccaactactcttatgccaatagagataacgggggagagtgtaggagaagtgagggcagtgtcgggtatgcaccaacgcaaggcagaaatggcgagagaagccgatgcatttattgcactgccaggtggatatggcaccctggaagaactacttgaagtgatcacctgggctcaactaggaatccacgataaacccgtggggttgttgaacgttgatggctactacaactcgttgctgtcattcatggacaatgctgtagaccaaggtttcattacacccgctgcccgtcacattattgtctctgcccaaactgcccaagacctcatttccaagcttgaggaatatgtcccgaagcactgtggcgtggcaccaaagcaaagttgggagatgaaccaacagttataaacagttaacactgcaaattgccaaattcagacacttgaagttaaccaagtcgaatctacatattttctctgccccattagaaaatagctttctcaatacaaatcaagccttatggctgacattgtgttatcgcggatcgatcagaatctgatctgtatgatcaaagaacgtaacaccagaaaacttccatcattaatcgtcggtgcttatagattctgtgctatatagtaaagcttgcttcagtcaagtgatgggtactttctaaatagctatttcaaacaattattcagttcttaaatcgtttagctatttttctatttttgttcgttaacaaagtacacccgtttatataaacttttgtgtatgaatcacttcttacgcttaaaaagaaa

SEQ ID NO: 569 - DNA, 1120 bp, Glycine max
tttggctataaatccttgataaaattggtgatctttcctaatcttgcaagggatattttccgtcctcaagttcacaggacgtgttaggatcaccagttaagcaagccatgaaaatgatgaagtcgtctaggttcagacgaatctgtgtgttctgtgacaccagccatggcaagaaccccagctaccaacacgctgcaatccaactcgccaaacaacttgtggagaggaacatcgacttggtttatggaggagggagtattgggttgatgggtttaatctcacaagttgtgtttgatggtggacgccacgtgttaggggtcattccaactactcttatgccaatagagataacgggggagagtgtaggagaagtgagggcagtgtcgggtatgcaccaacgcaaggcagaaatggcgagagaagccgatgcatttattgcactgccaggtggatatggcaccctggaagaactacttgaagtgatcacctgggctcaactaggaatccacgataaacccgtggggttgttgaacgttgatggctactacaactcgttgctgtcattcatggacaatgctgtagaccaaggtttcattacacccgctgcccgtcacattattgtctctgcccaaactgcccaagacctcatttccaagcttgaggaatatgtcccgaagcactgtggcgtggcaccaaagcaaagttgggagatgaaccaacagttataaacagttaacactgcaaattgccaaattcagacacttgaagttaaccaagtcgaatctacatattttctctgccccattagaaaatagctttctcaatacaaatcaagccttatggctgacattgtgttatcgcggatcgatcagaatctgatctgtatgatcaaagaacgtaacaccagaaaacttccatcattaatcgtcggtgcttatagattctgtgctatatagtaaagcttgcttcagtcaagtgatgggtactttctaaatagctatttcaaacaattattcagttcttaaatcgtttagctatttttctatttttgttcgttaacaaagtacacccgtttatataaacttttgtgtatgaatcacttcttacgcttaaaaagaaa

SEQ ID NO: 570 - DNA, 3177 bp, Glycine max
aactttggaacgaaggcatgtgctgtgttgtgtttatgcattggtgattactgattagctagcagtagcatcgtccccttctccaaagatcgtataaccttcaatccatcttcatctccgttgcagctactttggcatcgtattttctgggtcagttctgtcgaattccttggtccaagactttgcagctgaaccaacagcatggcgggtcagtcctccaatgaaggctccagtactggaaacatttcagcagaatgttccgattcaactgttcagctcaatatcaagactctagattcccgcatctacagttttcaagtggacaaaaatatgcctgtttcattgttcaaagagaaaattgcaaatgaaattggtgttcctgttaatcagcaacggctgatatttagaggaaaagtcttaaaggatgagcatgttctttctgagtatcatgttgagaatgggcatacattgcatttagttgaaagacaaccaaatcagtctcaggcttctggtatgagttctggtgagtcaactggtacaagtggtaaccgaggaaatggtgtaggctcaggggctcctcgtaatcgtgttgggcaaatttcacatagtgttgttctgggaacatttaatgtgggtgaacaaggtgaaggaattgttcatgacctcactcgggttattgggcatgttttaaattctattggaaacagtggccagagcacaattagtggtcctaatgctacgcaaacttcttcagttcagccaaggaatgaaactgatggaatgcatgctggaaatcaaaacccagcaggaaatcaggcaccatctggacagacatttcatggcccgacatttcaatctgtctctcatgttgttcagattcctgtggcggcagggaccatacccattccttctctcaatgcaccaattcctgattcactgaacacactgtctgagtttatgaatcgcatggaacagatactaacacaaaatggttatcaatcaaatctttcatctgctaaccctagagatcagctagtggaattgccttctaatgtacaagggttgccgacacttgaagcattaagcactgtcttgcatcgtgcagaacagttacttggtggtcaagctgttgctgcactatctcatattgcagggcgcttggaaagagaaggtacttctgctgatctgcacataaggggtcaaatacaatcagaatcagtgcaaataggacttgctatgcagcatttgggtgcacttctacttgaacttggccgaacaatgttgacactgcgtatgggacagtcttctgcagaatctgttgttaacgctggaccagcagtttacatctctccatcagggccaaatccaataatggtgcagccttttccacttcagacaagctccctctttggtggtccagttcccccctcaactcctgcaactttaggcaccattggaattggaaatgctcctaggaacgtaaacattcatatacatgctggtacctctcttgcaccaattgtttcagccattggttctagggaaaataatggcgaggggacaagaagtgaacaccataatgagcctggctctggtgattcaggttcaacacgggtattacctgttagaaatgtcatagcagcaactatcccatcacaccctcctggtgttggagtctctagtagcacacaaactgggtttggtatttctacctcacagccaccttctgattcagcttcattgtcatctgttttagctgaaatcaattctcgccttagaaacgttgttggtaatatgcaaggagataacacagttccatcaggtcaaatggaatcaaacagcagggacttgtcttctggatctgaatcaagacctcctacagtaaacaaacagcaagataccgtggacgtgaatggttttggggctatcagtgcttcctcagttggctgcacttctgaaagtgaagtacagaaggtccaaaccgaggcagtccaaacctcaagtaatgttttggttgacaaatttgtttcaagttcttccaaccaagatttacaaagttgttctagtggagaaacaatagtaaaaccagaaatagaacaagatgttctggctgtaagtgaaagacaaaatgtaactgaacctgccaaagctgctccactaggattgggtgtgggtggtttagagcgcaagaggcgaactagacttcaacctcctgtaagtaaaggtgctgatgatggatcatccagttcttctgtcaatcaaaatcagcaaaccagaacagatggtcaacatatattgcaaactcttgcaagtcatggatccggtttgaattcaagaaatgctaatgggccatcccagcggcccttgccctccagtgatcgtccaattgatgtggctggtttaatgtctcaggctttacatagtcctgccttgaatggtttgttggaaggagtttcacagcaaactggagttgactcacctgatggcctgaggaatatgttgcatcagttcacccagagcccgcagatgatgaacacggttaatcaaattgtccaacaggttggcagtcaggatgtggggaatatgtttgctggaacggaaagagggcagggtggtggtattgacatttcaaggatgtttcaacagatgatgcccattgtatctcgagcccttggtgggggaaatccttcctcactattctctgctgaagaagctgaaccccatgcaccctaccgagatggaacagttgacagagatgaatattctgataatcaaagtttacagctttaccttcaaccactggctgagaggattgagcacctgggtccttctactgatattttccgtgctgtagctgaaattgctgtccagctatctggcagtggaagcacttctaatgatcttctggatgagttgtgcagcaatgagagtcttgccagggaatatgtagatatgttgcgatttgattgatgaggcagtctattcacagtggaggaggagaggaaacttgtataggaatgaagaaggaaaaaaggataaaattataattttttttaaatatgttggatgtaaaaaaaatttgttgggtgtcggaagaataccactaggacaagtttatggattgaagtatatttcagaaaaaatcattcaggaaattgaagtatattttgtagaccg

SEQ ID NO: 571 - DNA, 411 bp, Glycine max
atggcacgtaccaagcaaaccgctcgcaagtccaccggcggaaaggcgccgaggaagcaattggcgactaaagccgctcgcaagtcagctccggccaccggcggagtgaagaagccccaccgcttcaggcccggaacggtggctctgagggagatcagaaagtaccagaagagcactgaacttctgatccgaaaactcccattccagaggctcgtcagagaaatcgctcaggatttcaaaacagatcttcgtttccagagcagcgctgtttctgcgcttcaggaagccgcagaggcttatctcgttggactcttcgaggacaccaacctctgcgctattcacgccaagagagtcaccattatgcccaaggatattcaacttgctcgcagaatcagaggcgagagagcttaa

SEQ ID NO: 572 - DNA, 1452 bp, Glycine max
accattttttaaaaaaaataaaaaataaaattggtcgtgggttgagtaagttaaacgaaatttcaatccaaaatgtttgggactttgtttgggtgataagagagcgatgttggtgttccgaagattgatccagaatcctcctatgaatgacgataagagatgagagaacaaagctttggagataaaatgcatggaataactctccctctcactgcaactgcaaatagcttccttttgagatctcctctaccaagttgtttcatacccacttgtaaagttagctacggatttcgttttaaccattctcagtggaagcaccataaaacagaaggatggagcaataggaatagaacgatggtggtgagagcaaggcgtagcgagtcaccgtatgatgttttgggagtgtctccatcagcatccgtcgacgaaatcaaaaaggcctatcggaaacttgctcttaagtatcatcccgatgttaataaagaggataaggcacaggagaagtttatgaggataaaacatgcatacaatacattgctaaattctagttcccgcaaaaaatatgattctggaagtcgaggttatgatttttctcaaggaagccgaagtaggaatgtacaaactgaagaagaattttatggactaggtaattttttgagggatgttcaaataacaatagaggacttctttaaggatcttcaagaagaattcaagaactgggaagcaaacgctgcttcacaaggaaagccaaagagtctatgggaggaattggcggaaataggagaagaatttgtggagttccttgagaaagaacttaatattactgatcaaaatgatgattataaaacgtctcagggagaaaatacatccaacttttctgggacggagacaccaagcaatagcagtcaaggtgaagctagcaagggaaacagaagcgttgacgataacattgaggaaatagaagctactctggctcagttgaaaaaggaattaggtttatagcataaaaggattaggttcctccatttggtagagagaaaaagtcacagaattcattgcctctcattcttggcacaagacatggcctttaattatgtgaaggcatatctcttggtggccattgggaaccaaagtcaccaaattgactatgtaacactagggcttcatctgttttattttttttgttttcggtgttagttgggtgggtaggggcagtataacaacactaaaacttaaatcatggatgtatttggtgagatgaatgcaagagaaatgtaaagggattataatttatttggtttgtgaaacattttatgcggaactcgaaacattgacaaatttatttggattctaaggacatttacaaacaaatgtaaagggtccacttcgtgaattctgaatttccatttacctttccccattattttttttgccatctataggaagctttct

SEQ ID NO: 573 - DNA, 2839 bp, Glycine max
caaatacaaggaggggcagtatatttatttacatacatgcatatatactagtggaaatttatttatgctaaatatctgaaactttactaattaaatgtgtttgacgaccaaaaaactctttgaaaaagaatctagctacgtgatattcgatatatgaggaatcctgaaactttgcttgattaaatttttatggtggcacatggcagggtagttgtcggcttgagaatggataaaagcatatctgacaaggatcagggagctcttgtagaaggttttgatttttgtttgccagaggttttgattcatgggtggttcttctgagtttgagacagagttgtactttggacagatatataaaatactgatcttcactccttccttccaagagttcatcattggcaataacgttgtaaggctggtgaaaggggagatggatttccttatcacagaactgagtgacatgtttaacctttaaataaaaaagtgatctagatcagagaaaggctgcagttcatggaagatagtggaaggtttgatgagaagtccttttcaaatggggatgtctacataggtatgatcaagggcatagtgcctcatgacaagggaaagtacacatggtcagatggaacggtatatgagggcgattgggaaggcgagaaaatgacaggaaagggactgattgtgtggtcatcaggagcacaatatgagggtgaaatctctggaggttacctacatggttatggaacacttacaacatctgctgggtgcatttatagaggaggatggaggatgaatgctcagcatgggattggacggaagcagtattccaattctgatgtttttgagggtttatggaaagaaggagttcctgaagggagtggcaggtatacttggaataatggaaatatgtatgttgggaattggaaaaacgggaaaatatatggtcgaggggttatgaagtgggttaatggtgatacttttgatggtttatggttaaatgggcttatgcatggaacaggagtttatagatttggagatgggggcctttatattgggacatggaataaaggcttaaaggatggaaaaggagtattctatcctgcagaaaaacaagaggctccaaaagccagagttaagcgtagcctttctgaaaacatgccggtcattagtagattcaaaagtttccgtcaaatatctcacaggacttcatcattgaaaataaatttgatccgtagtgattctgctcaagattgtgtatgtcatgattcttctcttacattatccaatgcgttggatggagatcaatctgaggcatcgggtgaaagtactttggtttatgaaagggaatatgtacaaggagttctaattatggagagaatttgtgagtgctctgagtcatcacgtgaaaagaaacagcaaaataagtttagtgtgaagcaagtaaagaagagttcatgtttggacatttttgaaggccggcgaagctattatcttaagcttaatttgcagcttggcatcaggtataccgttggcaaaattacaccagtgcctgcacgcgaagttcgatcatctgattttggggatcgagcaagaataaggatgtacttcccaagggctggttcaaagcttactcctccgcatagttcaataaacttctactggaaagattattgccctatggtcttcaggaatttgagagagatgttcaagttagatgctgcagagtacatgatgtccatttgtggagatagtggtctaagggacttgtcttctcccggaaaaagtggcagcattttctatctttctaaagatgatagatttgtgataaagactgtgaataaatctgaactaaaggttctgctcagtatgcttcctaaatattaccgtcatgtaggagatcatgaaaatactcttataacaaaattcttcgggctccatcggataacattaagaggtggaaaaaaggtgcgttttgtggtcatggggaatgtgttttgcacagaactacaaatccaccgccgatatgatctgaaagggtctaaacaaggaagatatacaaacaatgataaaatcaattgcaacacaacattgaaagatcttgatctaaaatatgagtttcacatggataaaaaattgcgagaatccctactcaagcaaatttccctagattgcaagttcttggagtctcagcatataattgattacagccttctgttgggattacatttccgagctccagagaatatgaaggccttcgtggaacatcatgaatcagtgcagcgtcaggagagtttaccttctggagatgaagggcagctcttgattcttcctaaaggcttgctgttagtttcccatgaaccgagtatagtcaacacggctcctggaccccacattagagggaacacattgagagcatactccatgggtgataatgaagttgatcttctacttcccggtattgcaaggttgcgggtgcagcttggagtaaacatgccagctcaagctactcgcaggcttcaggaggataaggataaggtggaggcaaaagaagtagagctttttgaggtatatgatgttgtcctctacatgggcgtaattgatatattgcagaactataatctgagaaagaaaattgagcatgcatacaaatcgctgcaatttgaccctatgacaatatcagtagttgaacccaagatttatgatgaacgtttcatcaaatttttagaggaaaaagttttccccaagaccccctgattttatttttctcccatacgtcacttcttggcttaatccatctatgtaattatttgtttcaaatcaaaggaagattgtttttttt

SEQ ID NO: 574 - DNA, 2730 bp, Glycine max
gtcggtttttgcgtgataccttttgcccaaattaaaaaatagtaataattttttaaagaagaaaatctgcgggcaagttcaagttggaggatagtaaagaagggtctggaaaggaatccccacgcgtgaggtgaacaaacaacgaaaccaaaccaacgcttcccactccaatttctctgaattttctttcgcttcttattcccaaactctgtgattttgcacgaaatttcatcttcagcataatcttattagcaggctgttgtgcaatctgatctcaaaagagctagagatgaagatgtcgcttggtagtttgttaataagactcctgaaacactacccttgaaaagctagttgtggattggtggtggggtagctgatgctacagttaatttgaagtgtacagtactcgttaatgcttgaagattagataacgtgtgggatggatttggtgaaaatgatgatcatagagtgccccatgctagtgacaaacataataatcagtttgtaatacaaggagatagctgtaagaaaacacgtcttgaattacatggtatcagaaatagtgattatgtgaatagctacggtactcagggtaaagaggaattgtacttagaaaatatgattcaaaaagaaagaatgctggaaaaggattcatggtctcacacacctgaaggtgtgttttcttcatgtggtagtgactcaagcaaagaagccaaaaggctaacatcagatgacacgggcatgcccgatcattgcttcaagagcagtaatttagattctggtggttgtgagctctgtgaagatgatattatcttgggagacaagtgtgtggtggaaaatgatagtgtctgtcaatatccaaccagtcacatatcccaagttgacaatgaactcagttttcttgataatgatgggtggctggatataggagactttgaagatgttgacaggatgttaagttgtgatttaacatttggagcgggaagtctcaataacgaagaggagttttgctggctctcatcttctcatggtgctgaaggttctgatgatgcattgaagtctgacttcaagttttcatatgcagaaatgagtccattgaaaaatatatcagattataatatggattccaaggaaagtattgtaggtcttccgatcaatgatcccaaccaaagatcatctgctcttgatgaaaaaatcaggtctcaaatggatgttattgacaatggtgtccctgctccattatcaatgttcagtgagagtgattcagacatgaaatctgttaatatagatgacttgctgcccaaagaaaagctgcagaggaagttgccaaagccatcagcgggaaggcgaaaaaatggttacctacaaaatggtggttctgtgcatccttatgctgatccagagcaatgtgcagatacaaagcaatcctttggagcctcttccagtggggttacttctcttgatagcatccagaaacataagttgaacatagattctgattctttaggctgtatacagacacaaattcctatgacacgccctgactatagtcatgctccaaatcacacttccctctttccgactttgtctggatcaagatctgagcatgatggacatctgtctccttctcttaaagaatcatcttatgcatcaaacatggagagttcccatggtcattctttggaggctgcggccttgaaaacaaaagagaatagagaaaagttgtataattgctgtgatggacccctaaatagtagtttcaaaaatgaaaatacaccaaatcaaatgccattttgcagtccgggttcagctcagcaagtaggtcatcattttgaaaatgaaaatgaaggtcatagtgaattccgaggagttggcctaggcttttcaccagaaatagattcatcaacagtgcaggaaagctcatccatgggctctgctctggaccaagcttcacttgaagcaactagcttttgccacctgcaacagatcatggatcagttggatattaaaaccaaaatgtgcataagggacagtctataccgcttggctaagagtgctgagcatagacacaataattcaaatgcaaatggttgcattggagacgatgaaacatgcaaagcaatgatggcgcaggatgcaaacaggtgtgccggattaatggatatggaaactgacacaaaccccattgatcggtctgtagcacacttactgtttcacaggccctcagatccatcagtgttgcttcctaacgaaactttacctttcaaatccagtgccacgatgcatcatggatcagtgatcaatccaccagtgaagactgagaaacaggtctgtcaggaagattctactggagtggaaaaaaaggttttacggggtaacacctaatgaaagtgaaaccagcgttggcgcatttcgttgtacaatttatacttttccggtcattgtcgtatatgatgatgtataattatttcgggctaactcggatccctttgttaatttctgaagcatttttgcataggatgccataatactaatgtaactttgtgctaatcaaatcatcaaaaggtagcatacgatgatttagtgtaatgctacgctcgcaactattttcacccgaaagatcacaattatcctgcgcagcccatgatcactcatcaaattaatttgaaactagcgtcacttgattgtaccatttattttctggaatgaatcttttctcatgacattttt

SEQ ID NO: 575 - DNA, 907 bp, Glycine max
attcatcaaattaacacctccctttcagtattattaatttctatagagctgaagaaattaatattaatcaatcaatcaaaatggggttgtgcaaggtttcatttcctgtattatgtgtgttggggttggtcatgattgtgagtcacgttgccaatgctcaagactcaccagcagattacgtcaatgcacacaacgctgcaagatcagaggtgggtgttcaaaacttggcttgggatgacacggttgctgcttttgcacagaactatgctaatcaacgtaaaggtgattgtcaactgatccactctggtggtggtggccaatacggggagaatcttgctatgagcactggtgacctaagtggcacagatgcagtgaaattgtgggttgatgagaagtctaactatgactacaattctaattcctgtgttggtggagagtgtctgcattacactcaggttgtttggagagactctgtgcgtcttggatgtgccaaagtagcatgtgataatggaggcactttcatcacttgcaactatgctcctcctggcaactatgttggccaaagaccctactaggttgttacatttgtagcagcgagatggctaccatttaagatgatgagttatataccatacatattaagaataaataatagcatcatgaatttatatagattcatgttatgatattttccatcgtattggaatacatgtgagctcataattaactcacacaaatcaataataatgttactcttcaacttgtcatgtgtatttgatgttcttctacgttgtcatttgtttttatattttattcctctttgaatttaattaatgatattcactgtaaaggatgttttggaacaacaaattaaggaaaggaaggaaaaaaaaaatcctcgtaacag

SEQ ID NO: 576 - DNA, 1727 bp, Glycine max
aatatctttctaatttttacagaagaaggaaaagagggagaagtgagagtgagacagagagcgaaagtgacggtgtgattagagcaagtaaagtagtactgtagtgaagagtaacgacatagatggtgttagcaggtgggactgataaaggtttggttttggttttggatgagaagaggaggaattgacacgagtgagtgagtgagaacaagacattgcacttgtcatcatcatcaagctctacatttctttatcatcagtcaacagacacgcatgcattcatttgttcagagcaagcagttttttatgaggaccgaataaaagattcaaatttctatgacgtctatcaaatcattgagatggctgatgagaaaaaagagtggattgtctgatgggggtaaatcaagtttcaagatgaaacatctgccttttctggcagttttgtgcacgataatgttattcattgtgtatagaaccacaaagtatcagtatcaccaagaagagattgacaaaaaatggagtttctggggacaaccaaaggtgtatccttcaacttatgggaagttgaaaggcttgccacgaggtataatacatgataattcagatttggagttaagaccattatggtcaagaagtagttcaagatcaaaggctgtttactctaactctaacttactggcagttccagttggtattaaacaaaagcagaatgttgatgctatggtgcaaaagtttcttcaagaaaacttcacaattattttattccattatgatggcaatgtggatggatggtggaatcttgactggagtagcaaggccatacacattattgctcggaatcaaacaaagtggtggtttgcaaaaaggtttctacatccagatatagtgtctatttatgattatatctttctctgggatgaggatctaggtgtggagcatttttcaccttcaagatatgttgaaattataaagagagaaggtttggagatatctcaaccagctcttgacccaaattcaacagagatacaccatagaattacaattagagctagaaccaagaaatttcatagaagagtctatgaacgcagaggcagtacaaggtgttcagatttaagtgagggaccgccgtgcactgggtttgtggaaggtatggctcctgttttctctcaatctgcctggtactgcacttggcatcttatacagaatgaccttgtccatggatggggagttgatatgaagctaggatattgtgcacagggagatcgaactaaaaaggtgggagttgttgacagcgaatatgtttttcacaagggaatacaaactctgggggggagtggtcacagaatgacaaaggtttcgaaactacaaaggacaactatgcagaaacaaggtggagtaggaattgatgtgcgaactgagataagaaggcaatcgacatgggaatttgaaatcttcaaagagcgttggaataaagccattggtgcagacaaaaactgggttgatccatttaagagtgaccaaagacgcataagaaaatggcgtgacacgcaacgccttgctaagaacaatatttaactctgttgcatatcttacagtttcattcacagggcattaccttttatttataggcataatttagtttgtgtagatgagtaaaaattcattcaattttgaaaaggaaaaaaatagagagtttttcttctttatattatcttgttatggttcgg

SEQ ID NO: 577 - DNA, 5586 bp, Glycine max
atgccttcaaaaacggtttggatagcaactaaccgtttaacactcaacgtcgtcgtttccgttaccatgaacttaacacagcgtcccgtcgcccagcgcggcggcgccagcaacttgccgcggccgcctcctccgccgctgaactccgtcttcaacatcatcccggtgcacgacctcctcacggaccacccgtcgctccggtacccggaggtgcgagccgccgccgcggccctccgcaccgtcggcgacctcccgaagcaccagttcatgcggtgggaaccggagatggaccttctggactggctccggttactgttcggtttccaactcgacaacgcgcggaaccagagggagcacctggttctccacctcgcgaactcgcagatgcgcctcgagccgccgccggcgatcgtcgacgcgctcgacgccggtgttctgcggcggttccggcggaagctcctccacaactacaccgcgtggtgttcgttcctcggcctgaagtcgaacgtacttctctcgcgccgccgcgacccgacggatctccgccgcgagttgctttatgtttcgctgtaccttctggtttggggagaggccggtaaccttcgtttcactcccgagtgtctttgttatatttatcatttcatggcgaaggagcttaatcatgttatagatgagcacattgatcctgatactggtcgtccttatatgcctacggtttctggtgaattagggtttttgaagtctgtgattatgcctatttataatactattaaggttgaggttgatagtagcagaaatggaaaggctccgcactctgcgtggaggaattatgatgacattaacgagtatttttggagtaggaggtgtttgaagagactcgggtggcctttgaattttgagtgtaattttttcgggactacgccgaaggagaagcgggtagggaagacggggtttgtggagcagaggtcgttttggaatgtttataagagttttgataggctttgggtgatgctgattttgttctttcaggctgcggttattgttgcttgggagggtaccacttatccgtggcaggcgttggagagaagggatgtgcaggtcaagatgttgactgtgtttatcacttggagtgctctgaggttgcttcaatcggtgcttgatgctgggactcagtatagcttggttacgagagagaccacgtggcttggagtgaggatgacgttgaagagcatggttgccataacgtggactgttttgttttcggtcttttatggaatgatttggattgagaagggttctaggccaatctggtctgatgcggccaatcagaggatttatacatttcttaaagttgtccttttctttcttatcccggagttgttggcattggtgctgttcgtggtgccatggttgcggaatgtcattgaggaatcggactggagaatagtatacatgttgatgtggtggtttcataaccggatttttgtgggccggggtgtgagacaagcacttgtagataatgtaaagtatactgttttctgggtagcagtattagcttcaaagttttcattcagttactttgttcagatcaagcctctagttgctccaacaaaggctcttttgaatcttaagagcattccttctaaatggcacgaatttttcagcaacaccaacagggtagcagttgtcttgctatggttacctgttgtgctggtatacttcatggatttgcagatatggtattcaattttctctgccttttatggcgcggcaattggtcttttctcgcatttgggtgaaattaggaatgtaacacaactcagacttagatttcagttctttgccagtgcaatgcagttcaatctgatgccagaggagaagctgcttagtcagcaagctacactgttaaagaagcttcgtgatgccatccacaggttgaaactgcgatacggacttggtcagcccttcaataagattgaatcaagccaagtggatgctaccaggtttgccttaatatggaatgagattatgataactttcagggaggaagatatcatcagcgatcgagaacttgagctcttgaagctgccaccaaattgctggaatattagggttattcgatggccgtgttcccttctctgtaatgagctacttcttgctgtcagtcaggcaaaagagctggaaaatgagtctgaccagtcactttggttgaaaatatgcaagaatgagtatcgccggtgtgcagtctttgaagcttatgatagtgttaaatatctgtttcccaaggttcttaaagctgaaaaagaagagcatttcattatgattaatatattcaaggtcatagacagctacattcagatggggaagttaacagaggcattcaagatgtctcggctaccacagatacatgccaaggtgagtgaatttgttcagcttttgatacaaccagagagagacatgaataaggctgtaaatttgttgcaagctttgtatgaactgtttgttcgagagttcccaaaggcgaagaagaccatcatccagctacgtgaggaaggtctggcacgacgaagttcaacagctgatgaaggacttatctttgagaatgctgtgaaatttcctgatgctggagatgcaatctttactgagcagctcagacgattgcatacaattcttacttcaagagactcgatgcataacgttccattgaatcttgaggcacgacgacgaattgctttctttaccaattctttgtttatgaacattccccgtgccccctatgttgaaaaaatgatggctttcagtgttttgaccccatattatgatgaggaagtattgtatagcaaagaggctctccgaaaggagaatgaggatggtattactactttgttttatctgcagaagatttatgaagatgaatggaaaaattttatggaaaggatgcatagagaagggttgaaagatgaggaggctatctggacagaaaaggcccgggatctccgcctttgggtatctcatagaggacaaacattgtctcgcacggttagggggatgatgtattattataggggccttaagatgcttgcgttccttgattcagcatctgagatggatgtaagacagggatcagaacatggttcaacaaaccaaaacagcagcttaaatggcttaccctcaaatgggccttcatctttacagacaaatctcaggccgacaggtagcagtgtgtccatgttattcaagggacatgaatatgggagtgcactgatgaagttctcatatgtggtggcatgtcaaatatatgggcgccacaaggcagacaagaatccccgtgctgacgagatattatatttgatgcaacacaatgaggcccttcgagtggcgtatgttgatgaggtttctttagggagggaggggactgaatattactccgttcttgtgaagtatgatcagcagttgcagagtgaggttgagatttatcgaatccggttgcctggtcctttaaagcttggagaagggaaaccagaaaatcagaatcatgccataatctttacacggggtgatgcagttcagaccattgatatgaatcaagacaattattttgaggaggctctcaaaatgcggaatctgttggaggagttcaatatgtcctacggtattaagaaaccaaccattttgggggtccgagaaaatatcttcacgggatctgtttcctcacttgcatggttcatgtcagctcaagagacaagttttgtgacactgggtcagcgagttctggcaaaccctttgaaagtacgaatgcactatggtcatccggacgtgtttgacagattctggttcttgggtcggggtggagtcagcaaggcctctagagtgattaatatcagtgaagatatttttgctggtttcaattgtactctgcgaggtggcaatgtgacacatcatgaatatatacaggtaggcaaaggaagagatgttggtttgaatcagatatccatgtttgaggccaagattgctagtggcaatggtgagcaggtcctgagcagagatgtgtaccggcttggccatagattagacttctttcgcatgctttcagtgttctacacaaccataggattttactttaactccatggttattgtactgatggtttatgccttcctttggggccgcctttatatggctctcagtggtattgaacatggtataaaacatgcagccatgaataatgctaccaacaataaagcccttggtgcagtcctaaatcagcagtttgcaatccaagttggtatcttcactgctctcccaatggttgtcgaaaactctcttgagcacgggttccttccagctgtttgggacttcttgacaatgcagttgcagcttgcatcactattttatacattctctttgggaactcgcacacatttctttggtcggactatacttcacggtggtgctaagtatcgagcaactggtcgaggtttcgtggtggcgcacaagagttttgctgagaactatcgactatatgctcgaagccattttgtgaagggtattgaacttggggttattttaattgtgtatgctgctcatagtcccttggctagggatacttttctgtacatagttatgacaatctcaagttggtttcttgtagtttcatggataatgtctccttttgtcttcaatccatctggctttgattggttgaagactgtatatgattttgaagattttataaattggatatggtatcctggtgggcccttcaaaaaggcagaatatagctgggaaacatggtggtacgaggagcaagaccatttaagaacaactggtatatggggaaagctgttggaaatcattttaaatcttagattcttcttctttcagtatggcattgtttatcagctgggtattacaggtgaaaataatagtatagccgtttacttgctgtcttggatagtcatggttgtgcttgttgccatttatatcatcatagcatatgcccaggataaatatgctacaaaggagcacttatattatcgattagttcagcttcttgtgattgtagtcacagttcttgtacttttcctcctactggagtttgctcatttaaaatttcttgatcttctatcaagcttcttggcattcgttccaacaggatggggaatgatttcaatagcccaggtgcttaggccttttctgcagacaactaaagtgtgggagactgttgtttccttggcccgtctatatgatttgctgtttggggttattgttatggctccaatggcaatgctatcatggttacctggatttcaatcaatgcaaactaggattctctttaacgaagctttcagcaggggtctccagatatctcgaatagttagtggcaagaagtctgtttaagatggtaattggaggtttttcaatgtgaagccctaaaaggtttagccttgtttcagtgtcactggtggctcaatgtgtgacattcccattgacattatctatcaaggaaggagtctctgattgctgccctgtaattttcctgctacaggatgatgagtcggctcatttctgttcaatagaagaaag

SEQ ID NO: 578 - DNA, 1509 bp, Glycine max
accttaccctttaaagaattaaatggatatttaccctaaacatcaaaataaaataataaaaaaaactggaaaactgagaagaacgagaggtccttgagccagatcttccctcccttgttaattcatcaaacaaaacgatgccggttttcaaaacccctttcaacggctactccgtgaagttcagccccttctacgagaaccggctggccgtggccaccgcccagaacttcggcatccttggcaacggccgcctccacgtgctcgacctctccgcggacccctccctccccatcggcgagctggccgcctacgacactgccgacggcatctacgacgtctcctggtctgagtcccacgactccatcgtgatcgcagccgtcgccgacggctccgtgaagctctacgacctggccctccccccgacctcgaaccccatccgctccttccaggaacacacccgcgaggtccactccgccgactacaaccccgtccgccgcgactccttcctctcctcctcctgggacgacaccgtcaagctctggaccctcgaccgccccaccagcgtccgcaccttcaaggagcacgcctactgcgtctactccgccgtctggaacccccgccacgccgacgtcttcgcctccgcctccggcgactgcaccctccgcgtttgggacgtccgcgagcccggctccaccatgatcctccccggccacgagttcgagatcctcgcctgcgattggaacaagtacgacgagtgtgtcattgccactgcttctgtggataagagtgtgaaggtttgggatgtgaggaactatagggttccccttagtgtgcttgaatgggcacgggtatgctgttaggaaggtgaagttctcgccccacgtgcggaatttgatggtgtcttgctcctatgatatgacagtgtgtgtttgggatttcatggtggaggatgcgctggtgagtaggtatgatcaccacacggagttcgcggttggggtggatatgagcgtgcttgtggagggcctcatggctagcactggttgggatgagcttgtttatgtctggcagcatggcactgaccccagggcaccttaacataaataagagtgaaaaatgaatatagagtttttcaattgatcttttccgcattcacacaagcttcaagtaaacagattatatatataattcaccacagtgaggtgctctggaaggttgaatagtctgattacagtggtgaattatggatggcaacaggtggatatgcaacttctttagttatttatatctatattctttttgaaatccattaccaaaatctgtttcttatcatgtttgaaacgaaaatgtaaactctttttgtccataccatgtcaaatctcctatctgaaatgtcagataaccaagatatctgaataatggccattctaatgaatatgttggtggatgattgaaatctaatgtgaatctttgaagaaaaaaagacataaagctaagagattttccatgtgg

SEQ ID NO: 579 - DNA, 1115 bp, Glycine max
acagattgccaaaacaattaacctattattctttgcatctttccaaaagcagcaaagaaaaactaggatttccaatcatcaattagatgatgaagctaatcatcttctctttcctactacttctctttgttcccatattttctaccacaacttcagcccagtcacctgctgcagcccctaaaccccaagcaaaacctgcccctgccacaccagctcctgctccagcaaaaccattggtcccctcattaccccaatcacccttgtctgattcttcttctaatcaagacatcatcagaattctaaggaaggccaaatcattcaacacgctaattcgcttgctcaaaaccacccaaattatcaaccaagtcaatgcacaacttgtgaccacaaaatctggaggaggtttaaccattctagcacctgatgatggtgccttctcacaactcaaagcaggttacttcaactctctcggcgatcgccaacagaaagcattgatacagttccacgttcttccagtttatgtctcaagctctaactttgactctcttagcaatccagtgatgacactggccagtgatagccccaatgggtatcaaataaatgtgacagcttatgggaacagtgtgaatatttcaactggggtggtaaatgccactctcacaggcattgtgtacactgataagacacttgccatatatcacgtggacaaggtgcttattcctttagatttctcaaagcctaggcctccagctcctgctcccacgttggcaaaggcacctaaagctgataaggataactcatcagcagatgatgatgatcagggagagttaaacaaggccacttctgctgcaaattccatcaatttaattagcattcgtggaacaatgttggtgtcccttggtgttgctttagtcgcagcagtaacattctccatatgaggaagagtcatttgcaggctgtcacttaattttcagaacaactacaagaactgttattttttgtgaagttatctttatgctcttttttcttcgttttctctgtattgtcgtatccagaaagattattgtattgcccaattttcttcaaataaaaaaaaatgtctgctatgttttgag

SEQ ID NO: 580 - DNA, 5545 bp, Glycine max
ctttctctctttcttcaccttatcttcgtttgaatattccttgttttctttcagactttctcccccttattttctgttgcttgctagttctcagctcttctccacgctccatgttcatgctttccttccttcgcctttcgtgacgtgcaacaatccatgttcatcattttgaagagggagaggggagcgattttgtgctgatgtgttttgcttaagcttatccaataaagaagttggtacaaatggcttttgagccattgaattggtattgtcggccagttgcaaatggagtatggacaaaatcagtggagaatgcctttggtgcttacactccttgtgcggttgactctctggtcatctccgtttccaacttgatacttcttggcctgtgcatttaccgcatatggttgattatgaaggatttcacagtcaagaggttctgtttaaggtcaaacctttacaattatattctgggattgctagctttatattgtgtggcagagccattatacagattgatcatgggaatatcagttctaaatttagatgggcagactcaacttgctccatttgagataatttcactgatcattgaggctcttgcttggtgctctatacttattttgattgggattgaaactaaagtctacatccgagaattccgatggtttgtcagatttggtttgatttatgctattgtaggggatgctgtaatgttcaatctcatcatttctgcgaaggagttctatagcagctctgtgctatacttttacatcagtgaggttgttggccaggttttgtttggaatactattgcttgtgtatgttcctactttggatccttatccaggttatacccccattgggactgagatgattactgatgctacatatgatgaactccctggaggagatatgatatgtcccgagaggagtgccaacatattgtcaagaataatgttttcttggatgaatcccatcatgaaactaggatatgagagaccactaactgagaaagatatatggaaattagatacatgggaacggacagagacactgatcaataagttccagaaatgttgggttgaggagtctcggaagtcaaaaccttggcttttaagagcattaaatgcaagtcttggaggaaggttttggtggggaggcttttgcaagattggcaatgatatttcccaatttatgggcccacttatattgaatcagctgctacagtctatgcaaaatggtgaaccatcctggactggctatgtttatgccttctcaatatttgttggagtggtctttggggtgttatgtgaagctcaatattttcagaatgtcatgcgtgttggttaccggttaagatcaacattggtggctgctgtatttcgcaagtccctaaggcttactcatgaagcacgaaagcaatttgcaactggaaaaataaccaacttaatgactactgatgctgaggcacttcagcaaatatgccagtcacttcacactctctggtcagctccagtacgaattgttgttgctatggttcttctttaccaacaacttggtgttgcttcccttcttggtgctttgatgctagttcttatgttcccattacagacatttatcattagcagaatgcagaagttatctaaggaaggattacaacgtacagacaaaagaattggtctcatgaatgaaattttggctgctatggacaccttaaagtattatgcatgggagagtagtttccagtctaaagtacagattgtccgagatgatgaattatcttggtttcggaaagcatcattactaggagcgtgtaatggatttattctaaatagcattccagtttttgtaactgtgattacatttggagtattcaccttgcttggaggggatctgacacctgcaagagcttttacatcactttctctgttttctgtgcttcgatttcctctcttcatgcttcctaatactataactcaggtggttaatgcaaacgtatcgttgaagcgactagaagatttactcttagcagaagagagagtacttctaccaaatccacctattgagccaggattaccagccatctcgatcaagaatggatacttttcttgggatgcgaaggcagagagggcctcattgtcaaacataaatctggatatacctgttggttgcctagttgcagttgttggcagtacaggagaagggaagacatcactagtatctgcaatgcttggagaacttccaccaatggcagattcatctgttgttttgagaggaacagttgcttatgtaccccaagtttcctggatttttaatgcaactgtacgggataacattttgtttggttctgtctttgacccagcaagatatcaaagggcaataaatgtgactgaactgcagcatgaccttgagttactgccgggtggtgatcttactgaaattggtgaaagaggggtaaacatcagcggtggccaaaagcagagagtatccatggctagagctgtctactccaattctgatgtgtacatctttgatgatcccctaagtgctctggatgcgcatgtggctagacaggtttttgataaatgcatcaagggagatttgagagggaagacccgagttcttgtcacaaatcagctgcattttctttcgcaggttaatagaatcattttggtccatgaaggtatggtgaaggaggagggaacttttgaggaactctctaaccatggaccgctgtttcaaaagcttatggaaaatgcgggaaagatggaggagtatgaagaagaagaaaaggtagatactgaaaccacagatcagaagccctcttcgaaaccagtggccaatggagcaattaatgatcatgcaaagagtggaagtaaaccaaaagaaggaaaatctgtccttattaaacaagaagaacgagcaacaggggttgtcagcttgaatgttctaacgaggtacaaaagtgcattaggagggttttgggtggttttcgtactctttgcatgctatgtctcaacagaaacgttacgaatatcaagtagcacatggttaagccattggactgatcagagtgctacggagggttacaaccctgtcttctataatatgatatatgcagctctatcatttggacaggttttggtgactttaacaaattcttattggttaatcatatcaagtctttatgctgctagaaggttgcacgaagccatgcttagctccatattacgagctcccatggtgtttttccaaacaaatccactcggaagagttatcaacaggtttgcgaaggatctaggtgacattgatcgtaatgttgctccatttgtgaatatgtttctaggtcaagtgtcccagcttctttcaaccttcatcctcataggcattgtcagcacaatgtccttgtgggcgatactgccattgttggtgttgttttacgtagcatatctatactatcagagcaccgctcgtgaagtgaaacgcttagactcaattagcagatctcctgtttacgcacagtttggagaagcactgaatggcttatcaacgattcgtgcttacaaagcgtatgatcgaatggcagatataaatgggaaatccatggacaacaacatccgattcacgctggtgaacatgagtggaaaccgatggctcgcaatccgattggaaacattgggaggccttatgatatggttgactgcaacttttgctgtcatgcagaacgggagagcggagaaccagcaagaattcgcatccaccatggggttactacttagctatgctctgaacattactagtttgcttactggtgtgctgaggcttgcaagtttggctgagaatagtttaaatgcagttgaacggattggcacttacatagatttgccctcggaggctccctctgtcatcgataataatcgccctcctcctggctggccttctttaggctcaattagatttgaagatgttgttcttcgctacagacctgagcttcctcctgtgttgcatggcttgtctttcaccattttcccgagtgataaggttggcattgttggaaggactggtgcaggaaaatccagcatgcttaatgctttgtttcgaattgtagaattggaacaaggaagaatattaattgatgattatgatgttgcaaagtttgggcttgctgatttgcgtaaagttcttggcattataccacaatctcctgttctcttttcaggaactgtgagatttaatctcgatccattcaatgaacacaatgatgctgacctctgggaggctctggagagggcacatttgaaggatgtgatacggaggaattctttggggctggatgctgaggtatctgaggcaggcgagaacttcagtgttgggcaaaggcaactgttgagtctttcccgggctttattgcgtagatcgaaaatattagtacttgacgaagcaaccgcagcagtagatgttagaacagatgcactcatacaaaaaacaattcgagaagaattcaaatcctgtacaatgctcattattgctcatcgcctaaacaccattattgattgtgatcgaattcttttgcttgatggtggtaaggttcttgaatacgatacccctgaggagctgctgtcaaatgaaggtagtgctttctctaagatggtccaaagcacaggagctgcaaattcccagtatttacgcagcttagcacttggtggggataagtcagaaagagaagagaacaaacatctagatgcccggagaaaatggctggcttcttctcgatgggctgctgcagcccaatttgctctcgctgttagtctcacctcatcccataatgaccttcaacgattggaagtggaagacgagaatagtattctgaagaagacaaaggatgctctgataactttgcagggggttctggaaaggaagcacgataaagaaattgaggaatctttagagcagcgccaaatatccccagacggatggtggtcatcgctttataaaatgattgaaggtcttgctatcatgagcagattgaccgtgaacaggttccatcaatcagacttcggttttgaggacagatcaattaactttgatcaggttgatatgtagggaaaactgcacttctttatataacagctcctgcctactgatgactgatgacttcgatcaagtcgatagacctaaggttttgctaactttattttggcgcgtagctctacaacggagctatgaaaatcaaccaagaactttttattgtttactttggtgagtagaaattcttttcatgtagtattgtaattttgattaccaaaagaattttcatcgatgctcatcttcattgagattgttcttttgtctatttagtttttaaaatattattatagataggaatggtttttagcaattattatattacacgaagacttaaatatttttttttgtcaaatgttgattttcatgtgacggattgatgcgatgtgacagtcatattattgacgttaagcataacaatgggatccaaatttgtgggatccactcgattgtgatgg

SEQ ID NO: 581 - DNA, 1133 bp, Glycine max
aatgtaaaataatttacacgacccacggtcttctgcagttgcttgattctttttggttcaatctttgttggattctattcccttcactttctctttctctctttcctttttattttttcctcttatgcttttctttttggttttttccccctcactttgcgcttgtcgatctttgtaactagctataatgcaagcacctcaagctgcatcagccactgatgaagctcctgagatttcccatcaggctgtcccccagcgaaacaaagaagtttcagacagtggacccggtggtaggcgccctgatatttcacttcaagttccccctagacctatagggtttggtagcactagtagtggaagggttctggaccattgtcaaagtttcggtaaagggatttcatcatcaagaggcttcttgcgggccttgagcttgaaaagaaaaggaaatgtagcagatggcgaaagaagttccctccttaattcagaccccaagacagctgcagacggacctaatatggcctccatatctgaaattgcatggaaaagatgtacttctcttcctgttacacctgcatcaaatctgtctccttcagtttctacacccatttctgcaaggacatataatgaacagactaagcctcataaagatgttgaccgttctaaggtttcaaggtccctttctgtacctgggcgaaatgttgttattgtaagatctgtctctttttctacccgtagcgaacaggagcaacaagattcaaatgatgatcaaataactcctgtgcaagtagaagttactgccgatgaagaaatccccgaagaggaagcggtgtgcaggatatgttttgatgtatgtgatgaaaggaatacctttaaaatggaatgcagttgcaaaggtgacctgagattggtgcatgaagaatgtttaattaaatggtttagcacaaaaggagataaggaatgtgatgtatgcaggcaagaggttcagaatttgcctgtaactttgcttcgtgtgactagctctgttagacaaaacagacagctgcaaggtcagcataacctacatccagagtcaataagcctacctcacatggtgggataagacttttgttgttgttgtatcatggacatttaag

SEQ ID NO: 582 - DNA, 1504 bp, Glycine max
tagtattagagagagaaaaaatagagatgggacattgggaatcaaaagtcctgcgggaggggcgctattggtttgcgtgagccatatacataagcaaccaaactcatcgtttgtcattcagttgcattcgttcattcactccctaacatagcaattactaccatttaccaaagtaaacccagagatggagtggtgtgtgtcaatgccaaagattgagctgcatgctcacctcaatggatccatccgagactccacacttcttgaactcactaaggctttgattggaaagggtgtcatgaatttctccgaagtggagcatatcatcctcaaatataaccgttccctaaaagaagttttcaagctgttcgacctaatccacattctcaccactgatcacaacactgttacaagaattaccagagaagttattgaggattttgcatcagagaatgttgtctatctggagttgaggaccactccaaagaaaaatgattctgtgggaatgagcaaacactcttatgttgaagctgtactgaaaggtctaagatcaatcacttcagttgatgtggatttcattccacattgtgaagattcaaagactctttttactcctgcaccggttattaatggacatgtgagaaaaaaaatctttgttaggcttctcttgagcattgacagaagggagacaacagaagctgcaatggaaactgtcaagcttgcattggaaatgaggccttatggggtagttggaattgacctctctggaaatccaagtattggtgattggaccacatatttgccagcattgaaatttgctcgagaacaaggtctttatgtaacacttcattgtggcgagttacctaattcaaaggagataaaaaatatgcttgacttccgtccccaaaggattggacatgcttgtttctttgaggatgaacactggagacagctgaagtcgtcgaacattccggttgaaatttgcttgacatcaaacgttaggacaatgactgttccatctatagatgttcaccactttgctcatttgtacaacgcaaaacatcctttagccctgtgtactgatgactcgggagtcttctctacctgtctctccaaggaatacaaaattgctgctgattcatttgggctgggaaggagggaaatgtttgagctatcaaggaatgctgttgagcatatattcgcagatagcaaagtaaaggaggatttaagaaaaattttcaattcagtggcaaaaaaatatggaagtgtaaccacagtttcatctttagagaatatctgcatttagatataattaatattagagctttgttgataaaaaaaacaaaatattagagcttagctaacgatcatgctggggattgccccttatcctagtttgaagttggtaatcgagtccttcacgtgcaaaaaaaagaatgtgtataagtgataaaataagggtgtaggattcacatttgatttaatgagtatttaaattcaaatcagc

SEQ ID NO: 583 - DNA, 1468 bp, Glycine max
taaaagcccagagaggcccattaaccagagccaccctttgtaaacggtaacgagctcgggagcagcttccatggaggcatagacggagacgcagtcatgaacaggacagagttcagattcttattcagagcaaaatttggggcagcaaggaactaaatcctctatcagcattagtttacctctgcgttctgtctctggtgcaatccagtatagattgttgggtcagttatggcagcgttgatttccaaaagaatcctacgttgttcttcttggtcattgcattcactaggacgatgttactttgattcacctagtgctgggtttgcctctatttataaacctcgtgatgtatgcagcagtttatctggggagagaatgttgcctgcagatcgttctttggtcaggtctatggtccgacagttttctacttctattttaactcctggagctgatgatagtgcatttccatctgatttattgtccaaaaagactctggcaacatctgagcgtactataggaaatctagatggagggctttgccaggatcttttaattccagttaccaactttcataatgaagacaagggctatatggtttttcctggagatgtttttgatttacctattcggaaggacattattcatcgtgttgttaggtggcagcttgcaaaacgacaacaggggactcactcaacaaaaactatcagtgaggtcagtgggactgggagaaagccttggaatcaaaagggaactggtagagcaaggcatggttcattgcgtgggcctcagttcaggggtggtgccaccatgcatggccctaagccccgaagccatgctttcaaagtcaataagaaggttcggcgtctagggctgaagattgctttgtcagctcgtgcagcagaaggaaagcttcttgtgtttgaggatctggaggttcccacacataaaaccaagaacattgtgaattattacaatcaaatggaggataccaagaaactgctgcttgtagatggcactatagatgaaaagttaaaattatctacgcaaaatctacactatgttaacgtacttccctcaattggcttgaatgtctacagcattttgctgcatgatacactggtgatgtcccgagctgctgtgaccaaaattgttgagcgcatgcataccccaataaatcgttgaggctttaacttcttattgtgcttaacttcatttactcagaaataggaacatttctgtaacaacataaagagatgcaatgagaatatctttggtaccaggtttcggttgtaattacaagagttaggcgagttatgccattttgcccatgttgaagttggaacttgggaacttgattgtcaaaatttggtgttcatgtgattattttttatcatgttttccattggttgaatctcatttttcaattctttcacatgcgtaggatctgataaacctgtacatcattcct

SEQ ID NO: 584 - DNA, 1329 bp, Glycine max
tcaagtgattagagagttcatagtcctctggcatcacaatgatgacaccggaatcattggaggagttggaaaaacatgcaatctcgggtcatcatgtgagggggaatagtgaatatgttagacttgccatatcggatgaaccgagggctgttgaaactgaaatgctacagcctctagcagactcaagaatgaaatctttcatgtggtggattaaagtctttttatggtgctttatcattgttatacttggtcttgttatattgaaatggggagtgccatttacttttgaaaaggtcctttatccaatcatggagtgggaagcaactacctttggccgtccagttcttgcccttgtacttgttgcttctctggctttattcccagtattttttatcccttctggcccttccatgtggttggctgggatgatttttggttatggccttggctttgttataataatgattggaacaaccattgggatggtcctcccttacttaattggactaattttccgtgaccgcattcatcaatggttaaagagatggcccaagaatgctgcaatgattaggcttgctggggaaggaagctggttccatcaatttcaagtagttgctctatttagagtttcaccttttccatataccatattcaactatgctgtagtagtgacaaatatgaggttttggccgtacttatgtggatcaatagcaggaatggtgccagaagctttcatttacatctacagtggtcgattaataaggactttggcagacgcacagtatgggaagcaccaattgaccactgtggaaatcgtgtataacattatttcatttattgttgctgttgttaccaccattgccttcactgtttatgcaaaaaggaccttaaatgaactcaagattgcagaggccaatcaggaagctgcctctgtatctgggagtggtaatcttgagatggagaaaggttcccattgaaaggcctcatcaaatttcccacgacagtgtacatttatgtataaaaattgggttaggactacatgtaccatagtgtttttcaccctcccacttaggccatttattgattattggaatgagtatgtagggtagaaaagtctgcaaatgcaccaatcgggtaaacatgataaacggctgtttataataaattggaaagagctttactaacgttttttatttttattttttataaaatgagaaattaacgatatatttattcttaaactttagtaattgagatgtagtgtaaattaaaccaaaggagtgtatctttattttacaaataatatcattctaaggaggggtgtgccac

SEQ ID NO: 585 - DNA, 1931 bp, Glycine max
ggcaagctagtggagcagaaaaagattgagtgaaaacttggaattcagtgaaatggctatggcagttcgtaatacaacaaatccagaagaattacagatagtcatccataaagttgattcagttcaattcagaagtccttcatgtgatctagtacaaaatacaagggattacgtgaacaaatgtgctcccatttacaaccttgcaattaaaggggactggaaagaagctaaaaccatgttagccaaagatagaaggttggctactgctgctatttcacagggatgggccacactacttcatgtggctgcagaagctaatcacttgcactttgtagaagagctggtaaaacttttaagcgaaaaagacttagaaatacaagacctgaaaggcaacactgctttctgctttgctgctgcagttggaaatgttaaaattgctgaagcaatggcaagaaaaaataggagtttgccaactatcaggggtggggaaggactcaccccacttcacttggctgctttacagggaaaaggtgagatggcatggtatctctaccatgatactgttcacaacctcaaccacatgtttggtgatgcagattggagtttattgttcttcctttgtatcaacaccggcatttatgatttagctttaaagatgttacaagagaatccaagattagccgtggctcagaatgagaacaaggaaacgggattgcatgttttggcccgcaaaccttcggcctttagttgtcaaggtcgaaggtatccaaatcagctcatcaactcacgtaagaatccaactttggctctccaacttgtcaggtgtttctggaaaaatcttctttctcttgattgcacagagatacaaatgagaatagtcataagccagctgtctcaagtaatattcatagccgcagaagttggaaattttgagattatagccgagctggttagatcttaccctgatctaagttgggaagttgacgccaaaaatcgaagcatcattcacattgctgttttacaccgccatgcagccatatttaatctaatacatgaaataagaactattaagaattttgtagtagcatatgaagatgctgatcaaaacaatttactgcattgtgctgcaaaattagcaccaccgagccaacttaacttggtctccggagcagcttttcagatgatgcgagagttacggtggtttgaggtggtcaaaaaggtcatgccaccttgtttcatagagaagagaaactccaatgggaaaacacctcgtgaactgttcactgaagagcatacagagttactgactaaagccgagtgttggatgaagggcatggcaaaatcatgtatgattgtttcaacgctcattgctacagaagtgttcactgcagcattcagcattccacgcggtgatggcggtgatgacaacaacaatggcaacctcaactgcaattctatcttcataatatttgcaatatcagatgcaactgcactgatatcatcttcagtttctattctgattttcttgtctatgcttgtcatatcacgttatgcagaagatgacttcttcaagtcacttccaatgaagctaatatgtggattggtaacactgtttatctccatagcaagcatgatggtggcatttagcagtgctttcttcataacatattaccatggcttaaaatgggtgccaattttgatctcagtacttgcaattgcaccaatcaccttattcacatttcttctgtttccattatggtcagacattgtctgctcagcctatttttgtaggtctgtatttcggccaagtaaacatgttctttactaggaaaactgaggccgtgtaaacaatgattctactgtatgttagataagtagtaatccctacgtcattaattgtaattctcaggaattctaaggaatgaagaaat

SEQ ID NO: 586 - DNA, 3237 bp, Glycine max
aaattaaagaaataaatagaataataattgtgacaaattgcatcacttttcaagtttccttatattcttcttcttcttcttcaatacctggttcgttaatttgaggccaagtgttcctgcttctttcggtaacagtctctctcatcgcaatctttcgaaaaccctactctctctctctctctcttctgaagctgctcggaagaaggatcgagcagtttcgcattcgattccagcatgaatttcagtgagctcaattcggcgctgtgatccgcacaaccatgtggttttccttctggagatccagagatcgtttcaccttggatcatctcaggtacttaactgatcaattggcgaaagttcaaatagttaatgaggttaataaggattttgttattgaggcactgagatctattgcggagttgataacatatggcgaccaacatgacccaagcttttttgaattcttcatggaaaaacaagttgtggcagagtttgtacgtgttcttaaacttagcagaactgttagtattccacttcagttgctacagacagtgagcattatgatccagaacctaagaagtgaacacgctatatattatatgtttagtaatgaacatatgaactacctaattacatattcattcgactttcgcaacgaagagctattgtcatactacatatcctttttaagagcaataagtggaaaattgaacaagaatacaatttctctgcttgtgaagactcgcaatgatgaagtagtttcatttccactgtatgttgaggcaatacgctttgcctttcatgaggagaacatgattcgcactgctgtacgtactgtgacccttaatgtttatcatgttggggatgaatgtgttaatagatatataactagtgcacctcacaccgaatacttctcgaacctggtttcattttttaggaatcaatgtatggatttaaatagactggtctctgagacactgaaaaatccaggcccagattcaacctctgcaattgttgctgctgtagatgaaattgaggataacctgtattacttcagcgatgttatctctgctggaattcctgatgttgggaggctaataacagacagcattttgatgcttctgatttttccaatgcttcttccttccctgagaatagtggacactaatgacatgcaaagtggtgttgtcacttctctctacttactttgttgcatcttaaggatagtcaagatcaaagatttggcaaataccatagtcgccgctcttttttatcccttagagacctttacaagattttctaggggtaaagtcaatggctatatatctgatcgtggtcttacatccgtaagccaagaaccagatgatgataatattgccaagtgcaatgcagaatgcttgacagtgaatgtcccacagtcttctagttcttcaggtttagacacagaaagtattatgtcagaagataattgtagcagttcaaatttggctttaagggaggttttgcttgcatatgttactaaaggggatgatgtacaagttttgggttctttgagtgttcttgccactctactgcaaactaaagaacttgatgaatcaatgctagataggcttggaattcttccacaacgcaaacagcacaagaaacagttattgcaagctttggttggtgaggcgtcaggtgaagagcaacttttttcttctgaaaatagcttgatgagggatggcagtggatgtgagcctggtgtctatcttgaaaagatcaaggagcagtacgggttatcttttctgtcttctgattttcttatgagccctcgtgtgcctagatttcaggtgctcgatgcattagtgagtctcttttgccgttctaatatatctgctgagacactgtgggatggtggttggcttttacggcagttgcttccttacagcgaggcagaattcaacattcatcatctggaattgctgcaggtttcatacaagaactctgctactgctcttgtaaaggaggttagaggtttctggcccgatcttcttattaccgttctttgcaatgagtggagaaaatgcaaaagagcaatggagtcatcataccctcctaaagaaccaaagtgcatactttttccttctcagatgttatcttcagaagaagatatacctgagggctcatcatttgctgctggagaaaaaatgcatgaagtagtgaaggtatttgtagttctgcaccagcttcaaatattcactctaggtagatatttgcctgagaaacctcttatttatcctcctggtgatctcccagcaaattctcgtgcccaaacttctggacttgatgtgtcaggcccaaaaccaggaactgaagtcagccttgttagtgctgtgccttgtagaattgctttcgaaaggggcaaagagcgccatttttgctttctagcaatctctgcaggaacttctgggtggcttgtgctagcagaagagttgccactgaagaagccctatggagttgttcgggttgctgcacctttggctgggtgcaataattgatgataaacacccaagatggttacatatgcggatccgaccgtcttctttacctgttctagatcctgcgaagttcaatgcccacgcccacgcccacgcccacgcccacgcccacgggaaattaaagacaaaagcttttgtcgatggtagatggacattggcgttcagggatgaggagtcttgcaagtctgctttatccatgattcttgaagagattaattttctgagtgacgaggttcacagaagactaaagcctttgctcaaccttgaaacggcattggatttatcaggcccagaggaggaggattcctcttcacattcaacaacacctcccaattctgtgtaaggtctttgactttatttgcaataacatgcggttttctactcgaggggtgggaaattattaagtcggtcacccttttttgtatatcctccaaaaatacatacataccaaatttgtagattagctactgtggtttagtgtcattctttttgtatattagtttttccttttgctgcctttcattctttaggagctctaacctaggccccatatttttgtttgtattactttattgctaagctctgtaacaaatgtaaatttgagggaactccgtaaagaaagttttattccttcttgcccaaacaagtgtctttattttaacgagttattgctaattttatggattatggaataatg

SEQ ID NO: 587 - DNA, 1961 bp, Glycine max
tcactttccccatcccatgtgtgtccctgtcagagtatgatatgaggaactaactctataaataaaactttctgaatcaaacacatcacacacacgtaacttcatctgggttgcagggaaaaagaaaaataaaatgggttccgataataccaacttggagttcttgaaggagatcggtttgggctcctccaacattggttcttacattaatggccaatggaaagccactggttcttctgtcacttctgttaatccttctaacaatcagagcatagctcaagtgactgaagcgactttgcaagattatgaggagggattgcaagcttgcagtgaagcagccaagacatggatgactattccggcaccgaagagaggtgagattgtgagacagattggtgaagcattgagggccaagttggatcctttgggtagactggtgtctcttgagatgggaaaaattctcccagaaggaattggggaagttcaggaaattattgatatgtgtgattattgtgttgggctaagcagacaattgaatggatcaattataccatcagaacgtccagatcatatgatgtttgaggtatggaacccactaggaatagttggtgtaatcactgctttcaactttccatgcgctgttctaggatggaatgcttgcattgctttagtctgtggtaactgtgttgtgtggaagggtgctccaacaactcctttgataactattgctgtgacaaagctagtagctgaagttcttgagaggaacaaattacctggtgcaatattcacctctttctgtggaggtgctgacattggtcaggcaatagcaaaagacacccgcattcccctggtttcatttactggaagttcaaaggttggcttgatggtccagcaaacagttaatgagagatttggcaaatgcttgcttgagttaagtggtaacaatgcaataatagtcatggatgatgcagatatcaaattggctgtacgatctattttgtttgcagctgtgggtactgctggtcagcggtgtacaacttgccgtagactgtttctgcatgaaagtatttacgcagatgtactagaccaacttattggagtctacaaacaagtcaaaattgggaatcccttggagaaggggactctagttgggcccttgcatactcctacttcagtggaaaactttcagaagggtatttcagtcataaaatctcagggagggaagatcctaacaggtggatctgtattagagtcagcaggaaattttgtacaaccaacaattgttgagatttctcccgatgctcctgtagttaaagaagaattgtttggtccagttctgtatgttatgaaatttcagactctggaagaagcaattgccttgaacaattctgtacctcaaggattaagtagttcaatctttacccaaagacctggaactatattcaagtggattgggccacgaggtagtgattgtggtatagtgaatgcaaacatacctacaaatggagctgagattggtggtgcctttggtggagaaaaggcgaccggtggtggccgtgaggcgggaagtgactcgtggaagcaatacatgcggcgttctacatggtaagtcttgttgaatttatgatgtttcatttcttggttataagttctattaatgacattataattgctgtccttggcagtaccatcaattatggaagtgaactaccattagctcagggaataaactttggctagaaagctatccttgcaaatgaaactgcacaaataatgcgattttgcagcccgaaagagagatgttagtctggctgacatgggttcaaagtgttgtattaacaagatctgcctgctgtaaggatggtaccttcacatgacagtttcaatgtataagatatcttaaatcttaaataaatttagctgcaaaagttcttatttcccagtcaaaatgtttgatgttt

SEQ ID NO: 588 - DNA, 642 bp, Glycine max
atggtgaagtcgaagagcgtggagaaacctgcggaggaacaacaacgaggtggtgtttcagcgtacagaggagtacggaagaggaagtgggggaagtacgtgtcggaaattaggctgcccaacagccgtcaaaggatttggttgggttcctacgacagcgccgaaaaggcggcgcgtgcattcgacgcggccatgttctgcttacgtggcagcggtgccaactttaatttcccgagcgaccggcccaacatcgctggcgggaggaacatgacgccctcgcagattcagatcgccgcggcgcgtttcgccaattcggagccccgaaaggagtgttcgggtaaacccgtggagtctttgacttcgattgaggaaacgacgtcgtttccagtaaattcggatacggatacatcttctcctctatcagtagtgacgatccaaaacgacaccgaagtagcaaccgggtcgtttccgggtatattttcgggtttcgggtcgggtaatttcgtccccgaattctccgattttccgagcttcgatgatttcggccacgatttcttcgtgcatgagcttccgggtttcgattacggagaagagaacttggatgggttgataattcaggactcgttcctgtggaatttctaa

SEQ ID NO: 589 - DNA, 1202 bp, Glycine max
attcacttttacacgcctttgaagtcttacatcacagtgagtcaaacatcttcactcgcccttcatcacatatataaacagccgcaacacaaaaacacccattcagaaaacacaaacaaacgcagccaaaacaacaactaacgacaaagattcttccccaacacaagggaaaaccggagcaacaaaaaaagtaacacacacgcacacacgcatcatcgtataacatttgttttattttttttaaagagcgagtgttgtaacaaatggtgaagtcgaagagcgtggagaaacctgcggaggaacaacaacgaggtggtgtttcagcgtacagaggagtacggaagaggaagtgggggaagtacgtgtcggaaattaggctgcccaacagccgtcaaaggatttggttgggttcctacgacagcgccgaaaaggcggcgcgtgcattcgacgcggccatgttctgcttacgtggcagcggtgccaactttaatttcccgagcgaccggcccaacatcgctggcgggaggaacatgacgccctcgcagattcagatcgccgcggcgcgtttcgccaattcggagccccgaaaggagtgttcgggtaaacccgtggagtctttgacttcgattgaggaaacgacgtcgtttccagtaaattcggatacggatacatcttctcctctatcagtagtgacgatccaaaacgacaccgaagtagcaaccgggtcgtttccgggtatattttcgggtttcgggtcgggtaatttcgtccccgaattctccgattttccgagcttcgatgatttcggccacgatttcttcgtgcatgagcttccgggtttcgattacggagaagagaacttggatgggttgataattcaggactcgttcctgtggaatttctaagcgggtcggggttaggataattttattatatcccaaccgtgtttagaattcggatcggatccggatttgggttggtcaatttttgtgagaccatgccctctgtgttagtagttagtgatggtaatgttttttttatgtacctagtagtcaaggtttcgattttttgggatgagaatcataatttatttatttgtcatgactcatgtcattaattgtaaagttgtctgctgatagtgtaattttcttttggccattcattcaattataaaaatgataagatattttcgtctggatatt

SEQ ID NO: 590 - DNA, 1463 bp, Glycine max
aaatatcgcattttggttgaagtaaaatggttttgttttgaatatgaattgtcatgtgtcgtggattggcagtttggcacggaccaatccctagtaaaagaaaaaaaaaacgtcgtcaaaattacgacaattattaactgataagctgagggtagttatagagaacaaggacatgttttctcttcacttcgcaggtactttagtatgaggcaccaaagctccaaggttcaggctttgtatgaacattgcaaaaccatcttatcgccctctggatcaccccctccttcgtcccaagctttgcagaagctttcttcgattctggacactattcaacctgctgatgttggccttaaagaagaaactgcagacgatgatcgagggcatggattttttggcactaatgcacttagtagattagctcgatgggctcaaccaataacatatgtggacattcatgaatgtgataattttacgatgtgtatattttgtttccctacttcttcagttattcctctccatgaccatccggggatgactgtatttagcaaacttctctatggctctttacatgtgaaagcttatgactgggttgagcctccctgcatcatagaaagcaaagaaccaggatatgctcaaggtctgactttaagactagcaaagttagaagttgataaggtcttgaatgcaccgtgtgatacatcagttttatatcccaaacacggtggaaatctgcactgtttcacagcagtgacaccttgtgccatgctagacattctcacacctccttacagagaagaggaaggaaggaggtgtacttactatcatgattatccttattcagcattctcagttgcaaatgcacctatatgtgacggggaagaggaggaatatgcatggctcacagagttagaatcacctagtgatctttatatgcgccagggggtatatgctggtccagctattcagctttagctctgcttgcttggatttaaaagcaattgcttgtttcctgctgtgaagggtggatgatattaatgcctgaaaatatacttatcccattttgctcctggaagctagtgacaagaggatctgaaatgctgatggatggaatgttctggtttatttgtgcctccttgtgctggatgcatattttgagcaaagattttcgtacataaatctgcattttctcattacctttgaacaacaaatctttgctatagttaccagtggctattgtgtttcataccatgttccctcattgttacaagttatagatgttctgtccctgcacattaatataagcataattgttttgtaataattatcatatggtatgtacaaaacggattcctgtgtagccgtaatcaagtatggtaatacttttagtatgatggaaaaagatgtcctggcatcagtctgtctttattatttgctgtgctgcgtgggttgcaaatgacattcga

SEQ ID NO: 591 - DNA, 2421 bp, Glycine max
atggtgtgttataaactgggggaatctcatttcttgcttgttttaacatgcttgtggttgtggttgtggtggagtactcgtatccacgttattgctgcatatcacagtttgaggcccggtgatactctgaattccacaaccgaactgtgttctgaaaacgataaatattgcttgggtttttcccaatttagttctgctcataacagcacttatttgcggatatacgccaaaggaaaaggtgactggaacatgtggattggtaatagaaaccaaccacttgacatggattccgcagttctgtcgctgagccactctggagtactgaaaatagaatccaaagacatggaacctatcatcctttactcttcaacgcagccgtcgaacaacactgtggccacgttgatgaacacgagcaattttgtgttgcaacgccttcaacccggtgggactgagagtactgtgttgtggcaaagttttgattatcctactgataagttgctccctgggatgaagttaggagtcaatcacaaaactggtcgcaattggtctctagtttcgtcaatgggttatgctaacccagctcttggggcattcaggcttgaatgggaacccagaagaagagaattactcatcaagcaacgaggacaattgtgttggacaagtggagaactcggaaaaaacataggattcatgcacaacacgcattacatgattgtctcaaacgacgacgaaagctacttcacaattacaactttgaatgaagagttaacaagatgggagctattaaaaactgggcagttgattaataggaatggagatgacaatgttgcaagggctgatatgtgttatgggtacaacacagatggagggtgccaaaaatgggaggacatacccttctgcagaaatcctggtgatgcatttgaactcaaagaagtttacctcaatttaaacctgaaaaattttctggctaattcgagttatagcccgagtgattgccgggatacttgctggaaaaattgtagttgtgatggattcacagattattacgatgatggaactggctgtatattcgtgtatttaaatttaacagaaggtgctgattttgcaagtgggggcgaaaaattttacatattggtaaagaacacccatcacaaaggtacaaaaaagtggatatggataagtattctaatagtagctgctctattttcaatatgtgctttcattctgtatctggccttaaagaaaagaaaacttcggtttgaagataaaaacagaaaagaaatggaaattaataagatggaagatttagcaacttcaaatagattctacgatgccagagatcctgaagatgagttcaagaagagacaagatctaaaagtatttagctacacatcagttctgttagcatccaatgatttttcaactgaaaacaagttaggacaaggaggatttggacctgtttataagggaatccaaccaaatgggcaagaagttgccataaaaagactttctaaaacatcttcacaaggaactgcggaattcaaaaatgaactaatgcttataggtgagcttcagcacatgaatcttgtacaactacttggatactgcattcacggcgaagagaggattctaatttacgagtatatgcataacaaaagcttggatttctatttatttgatggtactagaagcaagctactagactggaagaagcgtttcaacataatagaaggaatttctcaaggattactctatcttcacaagtactcaagactgaaagtcattcacagagacttaaaagctagtaatatacttcttgatgagaatatgaaccccaaaatttctgattttggattagcaagaatgtttacacgacaagaatccacaactaacactagtaggattgttggcacctatggttacatgtctcctgaatatgccatggaaggagttttctctgtaaagtctgatgtgtatagctttggagtcttactacttgaaattgttagtggaagaagaaacactagcttctacgatggtgaccgctttctaaatctaataggacatgcatgggagttatggaatgaaggtgcatgtctaaaattaattgatccatctctaactgagtcacctgatcttgatgaagtgcaaagatgtattcatattggtctcttatgtgtagaacaaaatgcaaataatcgacccttaatgtcacaaatcatatcaatgttatcaaacaagaatccaattaccttacctcaaagaccagcattctattttggaagcgagacctttgatgggataatatcttctacagagttttgtacggattcaacgaaagcaataaccacttccagagaaatagaatcaagtgaacatcaatggggagaagaagcacgaaaccaactccatttctcttaa

SEQ ID NO: 592 - DNA, 1900 bp, Glycine max
gttacattctataaatcaagttcgatacaaccccatcgcaaaatcagtgtgcaagcattccaatcgctcccaaaatcttttctaatttgttcataactcaataattctcatcatgggctccttgattgttccaggtgaacatgatcacaaactaaagcttgtttctcttccctttgtatcaaccagtcacctcattcccgtagtagacatagctaggctctttgccattcatggtgttgatgtcaccataatcaccaccacagccactgccgccattttccaaagctctatcgatcgcgaccgtgaccgcggccacgctattagaacccacgttgtcaagttcccatgtgaacaagttgggttgccagaaggagtagagagcttcaactccaacactcctcgggatttggtccccaaaatctaccagggactcaccattctccaagaccaataccaacaactcttccatgacttgcagcctgatttcttgttcaccgacatgttctacccctggactgtggatgctgctgctaagttgggaattccacggctcatttatgttagtggaggttaccttgctcactcttctcagaacacaattgaacaattctcacctcacaccaaggtagattcggatactgagagttttctgcttcctggattgccccatgaattgaagatgacgcgtttgcagttaccggattggcttagagcaccgacaggttatacttatttgatgaacatgatgaaagactcggagagaaagagctatggatcgctgttgaatactttttatgagcttgagggagattatgaggagcattacaagaaggccatgggaactaaaagttggagtgttggaccagtttccttttgggtgaaccaagatgctttggataaggccgatagagggcatgccaaagaagagcaaggggaaggagaagaagggtggctcacatggcttgattccaagacagagaactctgttctctatgtgagttttgggagcatgaacaagttccctactcctcaacttgttgaaatagctcatgcccttgaggattcagaccatgatttcatttgggtggttaggaaaaagggtgaaagtgaagacggggaaggcaatgactttctccaagagtttgataagagagtgaaagcaagcaacaaggggtatctaatatggggttgggcaccacaacttctcatactagagcatcatgccattggagctgtggtgacacactgtggatggaacacaataatcgaaagtgttaatgctggtttgccaatggctacttggcctctgtttgctgagcagttttacaatgagaagttgctggctgaggtgctgagaattggggtgccagtgggggcaaaggaatggaggaattggaatgagtttggagatgaggtggtaaaaagggaagagataggaaatgcaattggtgttttgatgggtggtgaagagtctatagaaatgaggagaagagcaaaagcacttagtgatgctgctaagaaagctattcaggttggagggtcttctcacaacaatttgaaagaactgatccaggagttgaagtcactcaaactgcagaaggccaaccacaaaagttaggccaatgcttggggataattgcaatcaattcaggacatagcactgtgattctaaataagtgacatgcctcattcaaaaatagtgtgaaatataatagtattgttgactagtaattgtactacttatgaaataaaagaattctaagtgtttgtatgtttttggttaaattagagtagtgtgatccaatgatttgaaagattttgcaactggacacttctttctgtaatcatgttattagtgtcaacataattaggtaaatctttgatttattgcttttcctat

SEQ ID NO: 593 - DNA, 1958 bp, Glycine max
aataacataattttttttggtgaatgaagaaataagataaatagtaactaatagttaattaaaggatctcgccgccgtgttgcctccgtcggaggggaagaaccactaccaaacttcaactcactttctctctctctctccccgatctataaatcattctctcactctaaaatctctctctccctccctccccgatctataaatcgttctctgactctgaaatctctctctctctctctctctctcactcttacaaagcaaagtttggtaattggatgcgttgaatgaaacttcgttagttcttctgctgaagaagtgagaaacatgtattctgatgaagaggtgtttgtttattcagagtagagtttgttcattgaagaactgagggaggttcaagtccatgatactttgaaatctgtctgtagtaggaactaagaagaccatgggacgagcttcattattacttatagtttttttggttcttggttcttcctttgccacctataatgtggtaacgatgataaggcactacggatcttcagaaggtgtggctgtggatgatggtgcattgttttttgaccctattactgagatgcctgatcatgtaaagaatcggaagacatctaaagcgccctttcatgtcgcgttaacagcaacggatgctccatataacaaatggcaatgccgcgtcatgtattattggtataaacaacaaaagaagttacctgggtctgagatgggaggattcaccaggattctgcattctggaaatcctgacaacttgatgaatgaaattcctactgttgtggttgatccccttccagcaggtttggaccggggatacattgttttgaataggccatgggcctttgttcagtggctggaaaagactaaaatagaggaagaatatgtgttaatggcagagcctgatcacatatttttacgtcctctgcccaatctggcctttggaggacatccggctgcttttccatttttttacattagacctgatcagaacgaaaagaccataaggaagttttatcctgaggagctggggccagttacaaatgttgatccaattggaaattctcctgtaattataagaaaggatttgatcgcaaagattgcccccacatggatgaatatttctttgaagatgaaagaggacccagagactgataaagcttttggatgggtgctagaaatgtatgcttatgctgttgcatctgctgtgcatggtgtgaggcacattctgcggaaagacttcatgttacagcccccatgggatcttgaaactaacaagaagtacattctccattacacttatggatgtgactacaatatgaagggtgaattgacttatggcaaaattggtgagtggagatttgataaaaggtcacatctacgaggacctccaccaaaaaacttgcccttgcccccaccaggggttcctgaaagtgtggtaacccttgtaaagatggtgaacgaggctagtgctaacattccaaattgggactcatcttccacctcatcatgatgatatcccaagtgcacatttcgaaaaggaaaaaaaaatagacatttgagtctttttttttgtcacgagtttagtcttagaatcatagatgaatgtagtaaactataccattttatatggcaatttaaacgcaggataaatattttatatatatttttttcttgttggtgatcttcttgaatggtatttgggctcgtaccacaatgccagatactttattcaataagtattggcttcgatattgcatatgcatatgttgacaattcttgtattttatgccatgcatagccctagacaacattataattgtttctgtattctcttaatttctacagcttatgtgtattgtatggttcttcgttcgtatagacaaggaacgttgaacttgatataggaccacgggttgaagtgaaaattgaag

SEQ ID NO: 594 - DNA, 945 bp, Glycine max
atggctaccctcattgctcccatcaccttttcgcctggtttagatgcagaagctcttagaaaagctttccaaggatgggggactgatgagaagaccgttatagcaatattgggtcacagaaatgttcatcagaggcaacaaatcagaaagatttatgaggaaatttaccaagaggacctcatcaaacgcctagagtctgagctctctggtgactttgagagagctgtgtaccgttggatgctggaacctgcagatcgtgatgctgttttggccaatgttgccatcaagaatggcagcaaaggttaccatgtgattgtggaaattgcttgtgtgctttcagctgaagaggtcttggcagtgaagcgtgcctatcacaaccgttacaagagatctttggaagaagatgtagctactaataccactggtgacattcgccagctgttggttgggttggtgaccgcatataggtatggtggagatgagatcaatgcaaaattggccaaaactgaagctgatattcttcatgaatctatcaaggagaaaaagggcaaccatgaagaagccatcaggatccttactacaaggagcaagacccaacttctggcaactttcaaccgctacagagatgaccatggcgcttctataactaagaaattgttggataatgcatccactgactttcagaaggcattgcacactgctattagatgtatcaatgaccacaaaaagtactatgaaaaggttctgcgcaacgctctaaaaaatgttggaactgatgaggatgcactgacccgtgtggtggtctcaagggctgagaaggacctcagggacatcaaagagcgatattataagagaaacagtgttcaccttgaggatgcagtggccaaggaaatctcaggggactacaagaaattcatcctcactctgttggggaaggaagattga

SEQ ID NO: 595 - DNA, 2729 bp, Glycine max
caataaccaagaaatcgctagaagaattaaaggaaaaaaaaaaagaaaaaggaaaagaaaaaataaaacagagcaacacaccaaccgcatagagagggaaacaccgaaaaaactaactgaacctctctcagtcaaaatatgcgattgcggtggcgtcggcggtggcccgggttgttgagtccccgatcgacggccaatgcagcggctcgttgcggcggcgtgtggcgtcgttgatggccctgcagatgacttggcagccgagtctcctgagtcagaaacgcaaaaccggaaccggtcctccgttagggctccgtaacctaggcaactcgtgctacctcaacagcgtcctccagtgcctcacctacactcctcctctcgccaatttctgcctccgtctccaacactcttctctctgtgattcttctgcgtcttcgtgtccgttctgcatactggagaagcagattgcgcgttctcttcgattggatctcacgtacgacgcgccgtctaagatccagagctgcatccggatcttcgcggagaacttccgctgcggccgccaggaggacgcgcacgagttcctccgctacgtcatcgacgcctgccacaacacctgcctccgcctcaagaagctccgccgcaaaggcgccgaggctaatggcggcggtggcggtgacactggcggcggtacggtggtgaaggaaattttcggtggcgccttgcagagccaggtgaagtgtctgtgttgtggatatgagtcgaataaggttgacgagataatggatattagtcttgatgttttccatagtaactcgcttaaagactccatgcaaaagttctttcagcctgaggttttagatggcaacaataagtacaagtgtgatagttgtaagaaattggtggcagctaagaagcagatgtccatacttcaagcacctaacatccttgtgatacaactaaagagatttgagggtatattgggtggcaagattgacaaggctgttgcatttgaagaggttttggtgctttctagcttcatgtgtaaagcaagccaggatccccaaccggaatataagctctttggcactattgtgcattccggctactcccccgaatctggtcactactacgcttatataaaggatgcaatgggtcggtggtattgctgtgatgattcttgtgtaactgttgcaaccctgcaggaagttttgtcagaaaaggtttacattctttttttctctcgaactaaccaaaggccagtggcaagttgtaattctcttgcttcaaatggtgtaaagcctcattccaatgggagccaaacatctgaatgcccaaaggttggtgtaccaccaaaagcagtgcatgtgaaatcaaattctgagctatctccttgtaaggatatgccaagtgtatctaagactgctaaagcaccttccagctcaagagtgaagtttgacattaatggaagttcttctaaaagaaatcctgctcccgtgagtgtgaatgggaaagttgatgtttctaggaatcagccttcagtaataaatgggcatgtgaaagattcagtttctttggagaatggtaagaaagattcttcactacccaccagcaatggcattgacaaaaataaagttgctgttgacaaattgaaaagaaaggagtcaacagttacaaatggacacactggtaatcagacagttgatattcattctgtaaagtcagatctcaaggaagatactgatagaagcagggtaatagcaggtagagtgcctgacaattttaagcatgaaagcaatgacctcaacaacaaacctacaatattggggaataagagaaagctacaggaggacccatgcattttacttgcacatgatggtcagtctcaagcaagagttcaagaactgaaggacattcttgggaaagaggcaaagtcagttttgaggtcatgtggctggacagataaggtctatgaatttatgcgttcaaagaagttacatgcacaggaggctggaaatttgacaaatggagatgaaataaggaagttgttaataggagatgcacagggagctttcatatccaagattcccgagtcattgaaacaggatatgattgaacgactccgatcatttagccaagaaaaaaaatacaattttcaggaccttgatccgagaatggtacgagaatgttgatctgtcgtgctagcgaggggtggtgtgaattctgtattactaatatatggatttttgtagtgatggtggcacccttgctgggatgctcagtttgggtttgttacatactaactctttgagctagtgctggcaatagtagcaggagaaggtggagaattgttatcattgaagcatggctttgttgcgcttctaggtgcttcatgcatatttgagatagaagttcagatttcatatctggccataagttttctttcttcatggaggctataaagttctaattgaatcttgaggagagcatgccaggaatctattcattctgtacaatctatattttagttatgtactggagcaaaatcttaattttctataaaattgctcaacaaattttgcagcgaagatgaggccgtgcatcctattaacagtgtctgtagctcttaaaaattcattcgctatctaaacgttttgcccgagaggtcctgaaatttgtgggatttatgattcaattttgatacacatcggcaactaagtaacatggttagaaaa

SEQ ID NO: 596 - DNA, 1303 bp, Glycine max
catgaatattataaattccttagtacgtagattactacaaataaaaaaaaataacaaaatagagagaaagggatataattacagtggctccaattacgtacggtttcttttgaaactgtataaaattattaaggtggcttttgaataaaaattcttcaaatattcataacaaaatttagagatttaattttgcttggtcagaagatgatgtccgtttataatttgtcatttaaatgttagagaggaatcaaaattggcgatgaataaggtgagagggaagggaagggagcgggaataatggttggtgtgtgtttgagaatgaaaggagagacagattctttggcagaaataggaaatagaaaattggtcctctgatctaatatttctttctatatcctctgctctgctctgaatgcaatgaaataataatgggggacgagtcgcccagaaacaaagtgaagttcctatgcagctacggcgggaaggtccttccaagaccctccgatggactcctaaggtatgttggaggcgagactcgtgtggtttctgtccctcgtgagatcacatttcccgagctaatgaagaaggtgagtagcatggtggagggagtcggagatatggttctaaaataccagctgataccagaagatctggacgcattggtgtcggtgagaacagaggaagatgtgaagcacatgatcgaggagcacgatcggcaccatactggagccttactccgtgcattcctctttcccccttccaagcaaacaggtttggttgcgtgcgaaccgtatctgttggagcagcgctacatcgacgccataaatgggatcatccgagcaagccccaggaagggctctgcctgctcttccccaaaatcaaactcccccgatgcatcccctcgcttttccaattcaaattcattgcatagagtccaaagctctcctaccctcaccgaccttggtgtgtttttggatcatcagcatcaaggccaacaacagcaatatcatcaccctaattttcatttttctagacccccccaggatcctcaacggcttggtgcaggaagggttccctcttttaactatcattactcaaacatcaccagacaactcacccacagaggagacagaggaggaggttacgcctactatgatgactctccgccatcctatgcccatgatagaattcatagtgtgtccaggagtcctagaagaaaatctatctgggaatgaataccgtgtaatctcttattttcacaaattcacctattgctaacttgtatcatattttatacaggcca

SEQ ID NO: 597 - DNA, 240 bp, Glycine max
atggcttcgctcgtgcttctcttttcagaactcgttcacaatcacgagtgggatgctgaagctctcttagcagcatacccttcttctaattttaccataacctcatcatcttgtgctgttgctgcgaaaaaaacattaaaagatgaaggtttcatgcagaagaacacccagaaaaccgaagatatagtggtggaaaatccattagagtcgagggtgtgtgtggatctcgtttggccttga

SEQ ID NO: 598 - DNA, 1188 bp, Glycine max
tgagtctttctcttttcagtagaatcgtgtcctgatagtcaagaatagtagaagatccaaatccacagaagagggtctcatgactcatcctaaactttatggaaacctttaatatgtacaattaatccaggaaatgaaattgctagcttaatattgatctgtagagaagacaagggaacttgcttgctatggcaactctgagcaattcaactaatatcttttggcaagattgtcaagtaggaaggcttgaaaggcagaagctacttaaccaaaagggatgtgttgtatggattactggactcagcggatcaggaaaaagcacattggcatgttccctaagcagagaactgcactcaaagggaaagttatcttatgtccttgatggagataaccttcgacatggactaaacaaggatcttggtttcaaagccgaagatcgcgctgaaaatattcgcagaactggagaagtggcaaaactgtttgctgatgctggcttaatatgtgttgctagtctgatatctccttacagaagagaccgagacacttgccgtgccatgttacctgatgcaaattttattgaggttttcatgaacatgcctctagaattgtgtgaggcacgagatccaaaaggcctctataagcttgctcgtgcggggaaaatcaaaggttttaccggcattgatgatccttatgaaccacccataaactgtgagattgaaataaagcaggaaaatggggattgtccaacacccactttgatggctggacaagtagttacttacttggagaataaaggatttcttgaatcctagggtttttaagtttaatcacatttgtaatgggattattctctcataatgatgtttcttctaaatgaagttaaaaaaggaatcctaggaagtgcaggtagcagagtggtgagaggataaatggactgataaagttcatcaatcataaataataattaataattgttgcaattcattctataggttggtcaagaatttcagcgtatttttcagcttttgatatgattgttttcttcgctttgctggtcattatggtcctaggaaattcagttacaaaggctgagacatatactcatgcttgtccgttaattgtaaattttcgtgcacctctaagaatgttagtgcgtttggataacacacaaaaatcaattttactcca

SEQ ID NO: 599 - DNA, 210 bp, Glycine max
atgggtgattgggctggtgtggtgataggtttggtactgtttgtggtgttttcacccggattattgttccagcttcctggcaaaggaaggcctgtggatttttgcaattttcaaacaagtggcgtctccatatttgttcattcccttcttttctttggctttatggctatcttcctcattgccattgatgttcacattggtagtggataa

SEQ ID NO: 600 - DNA, 1560 bp, Glycine max
atgggtggtggaggtgaagaagggaacaatttggaattcactcccacttgggttgttgctgttgtttgttctgtgattgttgctgcttcgtttgctgctgaaaggtttcttcattatggagggaagtttctcaagaggaagaatcagaagccactctatgaagccctggaaaaaatcaaagaagagttgatgctgttgggctttatttctctgctactgacaataacacaaaatgggatcatcagaatttgtgttccagtgggttggactcaccatatgcttccttgcagtctaaaggataaagaaaaggaagaatcaacaaaaaccacatcacattttcagacatttttctctttctctgatatttctggcactgctaggcgccttttagctgagagtgagagtgagaatgaggatcaccaaccagcaacaggagaaaaactttgtgctaggaagggcaaggttcctctattatctgtggaggcactgcaccaccttcatacctttatttttgtcctagctgtggcccatgtcacattttgtgttctcactgttgtctttggagggttaaaaatacgtgagtggaagcactgggaagactctattggcaatgacaataaaaatgaaacacaaccagttttggaaccaacagtgactcatgttcaccaacacgcttttatccagaatcgttttactggtcttggcaaagattctgctgttctgggttgggtgaaatcattcttcaagcaattttatggatctgtgaccaaattagattatgtgacattaaggcttgggttcattatgacccactgcaaaggaaatccaaagtttaatttccataaatacatgattcgtacccttgaagatgatttcaagaaagttgttggtataagctggtatctttggatctttgtggtcatctttatgttgctgaatgtccatggttggcacgcatatttctggatttctttcattcctctcattcttctacttgctgtgggtactaagttggagcatgtaataatccaactagctcatgaagtagctgagaagcattcggccatagaaggtgaattagttgttcaaccaagagatgaccacttctggtttaatcgtccgcacattgtcctcttcctgattcacttcatcctcttccaaaatgcttttgagattgcatttttcttttggatatggtttgtttctcaggttacatatggctttgactcctgtataatggggcgggttcgttacattgttccaaggctcattattggggtatttattcagttactatgtagctatagtaccctgccactttatgcaatcgttacacagatgggaactcactttaagaaggccatatttgatgaacaagtgcaagcacgccttgtaggttgggcacaaaaggcaaagaaaaaaggacaaagaggtgataatagcctctctggccaagaaagttctcgtgcaggtgctggaattcaactaggatcagtgttcaggagggaatctgcctcagaagacaatgttattgtcccaagaaatgatggatccgaatga

SEQ ID NO: 601 - DNA, 6770 bp, Glycine max
cagcccacaacaactcgcatagtccctcgccacccacacgcgcaagaagaacaacgaacgtgcaaaatatagcggacgaaacgaattagagaggaacaaaatcaccatcacgattacccaaattggcgacgtttgattctccgatattgcttccatggctgacatttgctgctacatgttggtttccatgggcaaatcgtgatcgaagtggtgccccttttccaaaaccctaggagagagaaactttgcgctgaaacggcctcttggggctctcacgttgtgccttggctcccaattacgccacccttttgtggattcagactctttaaaagatgggaagtgaagctttaagatattaaaggttgggaatgaatggatataaatcaggatctgctctccttgtaaatgctgaggttgattctatgggtggagttgttgacggtggaattggtataggtttgaagatctctccgcgcagagcagcaattgagaaggcgcaagcagagctcagagaggagtatgatgttcgtgaagaaagaagaagagagcttgaatttcttgaaaaaggtgggaatcctctggactttaagtctgggaatgctgcttcagttagtgttcagtctacttcactcactgatcagcttcatgagcagtttgtgaccagtgaagcaaaaggtagttttgcattgactgcctcccctcatggtgactctgttgacagtagtgctagacccggggctcctttggccagtgagcctaatactgctgataatctcctactttttgatggtgagaatgagttgcctgaaactgaaaggaggtgcttgcattcaaacagaaggaataatattgctctgtcagaacagtcttcccaaattgatgggagtcaaaatgctaaggagactgaagattctgctattttccggccatatgcacgaaggaaccgatctagatcaggtcatggtcctcggggagcttcaagggaagtgaaggggttaacgtctgaaacaaatagccaaaagaaccttaatttgtcaactgtatctaagccaaagccttcctgtttaaatggtgatgttggccccaaatatttgactactaataatactctgaataatgaattggttgggatccgagatcatcaatccactagtggcaatgctagtgttcccgaagacaaattggatattacggtgaatagaaacttaaaagaaaatcatggaactctaccttctgaagataatactgttcaagacccagttctcatggcttctggagaagataacatagttgaattaagggagccagtagctgttgtcaatcatgagcctccacctcatgtacctactacaaaacctgaaaatgggccttattgtcagccaaatgggtttggcaatgtagaagtagacaggaaaagtgtactaaatgaaggccaaaatagcattgctacattaggcaagaatttcaatttagagtcctcgtgcacaaaaactagcttagttagagatgtaaatattgatagtgatatgtgtactaatacaaagaatgttgatgctaatggaaataccatggaacaaacatttgcattagagaataaactgaacttcgctggctgcaaagttgtgaaagataggcataagaccaaaaatgcaaatggtgctactgttagcaatgagcatgatgctggttatcaaaatcattctggttgtggtaatattgtcaaagctgaggaagatgtccatattaagagttcttgcatgtcaaatgtcaaaggagtacctcataatgacagtaacatatcaaaagttgataaagataccatcttagtggatcagtccaattttgtcaaggaaaacagctgtgaaagacatcaggttcctgtggatgtgtcactttcagaacctcctaagactgctccagatgtaaagggtacaagcgccgcctctgatgatcaaccatgtcctatgcacaatatgaagttagcagacaaggctcatgaagattcaattttggaagaggctaaaattatagaggccaagcggaagagaattgcagaattatctcttcactccttatccacacagaaccacagaaagtcacactggggttttgttctagaggaaatggcatggctagcaaatgattttgctcaggagcgcctttggaagatagctgctgctgcacaattgggccatcaaacagcttttacttgtcgctcaagatttgaaaaactgaacagacaattagagacaaaaattttgtctcacaggatagcaaaggctgtcatgcagttttggcattcagctaagctgcttctagacaatgatcttggtattaactgcattgttggttgtgttgaatctgggaaagttgatgcaaatgaagctttgagggatcaaagaagaaatagcaatatgacaagcaaatttttggagggacaaaatcctgaaaaacatgctgcacttaaagtgcatgcatatgctttgagatttttaaaggctaatagatctcatggaatttcctctcaagcagaagcaccaacaacacctgaaaagatatttgactcaagcactgtagatatgtcatgggatgagcatcttaatgaagaaaatcttttttatgaagttcctcctactgcaatggaaacatatagaaaagctatcgaatctcatttcctacagttcgagaaaactgggagtagcattcaagaggaagttgcaacatctgtgtatgatactgcagcagagtttgggtctcaagagaatgcatatgatgaggaagaaggagaaaccagaacttattacttgcccagtgtctacgagggcaacagatcatcaaaatctgcgcagaagaaacataaaaatttgaaggcttacactcctagatttggtgatgctggtgctgattttccttatgtacactatgcaactggaaatcaaccatccatgctgtttgaaaaaagacctgctagtttaaatgttgggtcaataccaacaaagcgcatgcgcactgctactaggcatagagttgtaagtcctttcactgtcaacattgggactgtacaggctcaagctaaggcggatgcttcaagtggtgataccaattcctttcatgatgaccagagtactttacatgttggacccctgatccagaaaagtactgaagttgagtcagttgcagattatgaaaaacagttatctcaggactgtgcagaaacatttgttaaaacaaagaagaagaagaaggcaaagactctgggtactacatatgatcagggatgggagttggactctgttgtttctaatgaacagagggatcagtccaagaagagaggggaaagtcatcactttgaatctaatggaagtagtggtttctgtgggcaacccaattctaagaaaccaaagataatgaggcagtcacttgataatcctttggacaatattgtgtccatgactaattctattccttccccagttgcgtcacaaatgagtaacatgtcaaatcctaataaatttattaagatcattagtgggcgagacaggggccggaaagctaaagctctgaagatttcagctggacagcctggttctggaagtccttggtcactatttgaagatcaggctcttgtggtcctggtgcatgatatgggtccaaactgggagctcataagtgatgctatcaatagtgctcttcaaattaagtgcgtctttcggaaaccaaaagaatgcaaggagcgtcataaaaatttaatggatagaactaccggggatggtgcagatagtgctgaagattcagggtcttcacattcttatccttctacattacctggaattcctaagggtagtgcaaggcagttgtttcaacgtttgcaggggccattggaggaggatacactgaagtctcattttgagaaaattataaagattgggcagaagcagcattaccctcagaatcaggttgataacctggattcaaaacaattagcgcctgtccataattcacacgtgattgctctttccctaaccatccccaacaacctgaatggatgtattttaacgccacttgatctctgtgaagctgaagaaataaatccagatgtcccagcccttgggtatcaaagttctcatcctggtggtttgacattaccgaatcaaggttttgtaccatcaatgcttcctacatccggggtgaattcttcactaccagggtcttcttctggtatggttcttggccataacttgtcatcatctcctggtgcatctgtcagatatgggattccaagaaattcaccttcatcagtggatgagcaacagagaatacaatacaatcaaatgctatctggaagaaacattcagcagagtatgtcagttacagggactctttctggaagtgatcatggtgttcgcatacttcctggtggaaatggtatgggcttaatgggtggaattaacaaaaacatggcaatgaggccagggtttcaaggaatggcatcaccatcaatgcttaattctggaagcatgctttcctctagtatggttggtatgccaagccctgtaaatatgcactctggagttggtcctggacaaggcaactcaatcttaagacctcatgagaatctacatatgatgaggcctggtcataacccagaacatcagagacaaatgatggttccagagcttcagaggcaggtcacccaaggcaacagtcaaggtattcctgctctttgtgggctgagttctgcctttagcaatcagacaacaccaccagttcagccttacccaggacatgcccaacagccacaccaactgtcccagcagcagtcccatctcagtaatcctcgtcctcatcttcaaggtccgagtcatgccactaattcacagcaacaagcatatgctgtccggttggcaaaggaaagacaactgcagcaacgatacctgcagcaccagcagcagcttgttgcatcaaatgcattaataccacatgtccaggcaaagtctcaacttcccatctcatcattaccattgcagaacagttctcaggttcaatcacaaaattctcctcagcaagtgcctctttcacctttaacgccatcatcccctttgactcccatgtcatcccagctccaacagcaaaaacttcaccatatacagcctgggttcagcaggaatcccactgctagtgggttgactaatcaagcagcaaagcaacgcccacgacatccgccgcagcagcagtatcagcaacctagtaggcaacatcctagtcaacggcatgatgtacagtctcaacagcagacaaaacttctgaagggaatgggaagaggaaatatgttggtccatcagaacctctctgtggatacttctcaaagtggactctctctgcctgcgggaagccaaactggtgaaaaaggggaccaaatcttgcacatgatgcaaggtcaaaatttatatcctggatctggtttaaacccaaatcaaccatcaaagcctttgggtcatgctcattcttcaaaccattcacagttgcagcagaagctacattctgggtcaccaaccacttcatcaaagcaacttcatatttcttcagatactagtggtcaaggacaggtttcaccagtttcatcaggtcagttgttgtcacctcctcacccagctgttattgcttcgaaccaccatcagctgctgccacagattcagtctaagaaaattaatcaaactcaaataaatgttcagagaatgttgcctcaaaaccatctcgtgcattctgtgtcatcaagcaagtctcagtctgatccaactcaatctgatcaacagcctgcaaacagtgcttcccaggttagtgcaatgactcagggttgtgtggattctgctagtgtggtaccaggtgtttctactgtatcttctcagtggaaagtatcagaaccaccatttgattccactatgaacaatcaaacaactcaagtgagctccttggggagtgctcctgttgaaaattccactggaaatgagcaaccagcaattagtcaagggttggggccaagatcagttagcttgatttctcaggcacataattctgatacacagtggcagcaacagcagtcgcaatctctccaacagtcatcacaacccatcctatctcagcagccatatcaggctgagtcgcagcagcaacaggagcaagatcaacattctcctagagatcttgctttacaacatcaacctcagcaacatatgcaacatctacaatcagggcagagcagtttgtttatccagccacctaattctaatgtggaatgatgcattctaactgatggagcagccaagtgcgcttgttctgtcaggatgggagtttctatgccttaacagcagtgtacagataagctgattattcatggggactgtggaatatggaaacaggtattcattgtttctgcacgtgtcctgttgaagtactaaccgaagttatattggcaggcatcattgcttatcgtttgcaaatcttgtatattaccactgtttttagaaggttgacccccccctcctccgcattttgcttttttgaaaagagacgagtatagagttatttttgtacagggtcgtctcttgtttcctttgtactttctccctccttttccttttgtcttgaccttctcatgtgtagaggaacagttgccttttgttttactagattatcgggatatagaaatcatttttatgggcaaaagccaataaaaatttcctggtgttccaactacccattgatgtctatat

SEQ ID NO: 602 - DNA, 705 bp, Glycine max
acagtgctataacaaattagttgtcatatatagaagtgagtgatcagtgtcgatcagcagatttttcaaagaatggtgagggacgtgaagaatggtagagctctccttgttgcatttctgatgtttctgttggcatcagaagtgttgattttggaggctgagggtgcaggagaatgtggaaagacccctatagggtctgcagctgctagcctgagcccatgtttgggtgcagttagcaatgtgagggcaaaggttccattggcttgttgtgccagagttggggctttgctcaagactgctccaaggtgcctctgtgctgttcttttgtcacctctggccaagcaagcaaaaatcaaccctgccactgctatcaccattccaaaaagatgcaacattaggaaccgacctgctgggaagaaatgtggaaggtacactgtaccttgaaatcaaaacaatggaataatatgcagtattaagcagattagagagctaaataagtgcatgcagtcatatggcatcttctaccggtagagtgacctgtttcgattgtggccttgtgttttgccgcgtgtattgttattcacataacttgatgtcttgtttgtcatgataatattatggattactgtcatcttcccagacttaccattcctttcccttttattgtgaaagttacaatttacaagaacttatccagtgattagt

SEQ ID NO: 603 - DNA, 2927 bp, Glycine max
ggcactgccagattcatttgtagagtagcggttgactcgccctcgttcttttcttttcgtgtcttttatttgtttttatgtttttacgacacaaccagaaaagaaaataaagacaaaaaaaataataatcaaactgactcatatgcgggatctccaaactgcatttgaaaccatttctcgcgacaaaaaacaaaacctccccagagatcgatcgttgttcggagccacatacattgtttccaccacgcataaggtggcgaggaaatgattgatggagtccggtaagaacgagcgtgtgacgattcgcgagttctgcgcgaatggaagttgcatggaagcgaaggaacttgaggccaagcttgatgaaggaaatattcaagaagcagaatcggcattgcgtgaagggttgtcactaaattttgaggaagcaagggctcttcttggaaagttagagtatcagagaggtaatgttgaaggtgcacttcgtgtgtttgatgggattgatcttgaagcagccatacagcgattgcaaagttccctttctgaaaaaacacctgttaagaaaggccccactcgcagtgaatcaccttcctccgtctctcagcatgctgcaactttggtgcttgaagccatctacttgaaagccaagtctctacaaaaactggacaaatttactgaagctgctaaagaatgcaagcgtgttcttgatgccgttgagaagatatttggtcagggtatacctgatacacaagtggacaacaaattgcaggagatagtcagccatgcagtagagctccttccagagctttggaaacagactggttgctataatgaggcattgtctgcttataggaatgcccttcttagtcaatggaaccttgataatgattgctgtgcaagaattcagatggcatttgctgtgtttatgctgtacagtggggtggaggcaagtccacctagtttagccgttcagattgatgggtcctatgtacccaaaaataatctggaagaggcaattctgcttctaatgattcttttgagaaagtttagccttggtaagataaattgggatccttctattatggaacacctgacttttgcactttcagcatgtggtcaaacttctattttggcaaagcaatttgaagagttggcacctggtgtatatcaccgtattgaccgatggaattttttagctctatgtaatagtggagctggagaaaatgaaagtgctttgaatctgctaaggatgtcattgcataaacatgaaagaccagatgaccttatatcattattattggctgcgaagatttgcagtgaggatcctcatcatgctgctgagggagcaggatatgcacagagagcaatcaatattgctcagggcttagatgggcatttgaaaggtgtgggtcttcggatgttggggctttgcctgggaaaacaagctaaggtttcttcttccgactttgagaggtctatgcttcaatccaaagctctgcaatcattggaggaggcagttagactggagcaaaacaattatgatctaatttttgagctggctattcaatatgctgagcaccgaaatttaactgctgctttatcctgtgccaagcagttctttgacaaaactggtggctctaaattaaaaggttggagattgcttgctctggttttgtctgcacaaaaaagattttcagaggctgaagtggtgactgatgctgctttagatgagactgcaaaatgggagcaggggccactactcaggctgaaagccaagctgaagatctcccaattacgacccatggatgctattgaaatttaccgttaccttcttgcattggttcaagcccagaggaaatcgtctgggcctctcaaacttagttcacaggttgaggattatacaataaatgaatttgaagtttggcatggtctggcaaatttatatgcaagcctttctcactggaaggatgctgaaatctgtttgcaaaaggccagagaattgaaggaatattcagcagcaacaattcacactgaaggtattatgttcgatggtcgtggagaatatcaagaagctcttattggtactttcaatgcggtcctatttgaaccaaactatgtgccaagcaagatcttgatggcttctttgatactgaaaatgggttttaaagcttcacctgttgctagaagcttactttctgatgcacttagaatagaacccactaaccgtatggcttggtattacttgggattaactcacaaggctgacggccgattagtggatgctgcagattgcttccaggcagcttccatgcttgaagaatccgatcccattgaaaatttcagctgtatgctttgactagattccattctcaaacagttaactctgcagtcagattcatatcattttgtcagggttttttgatacgagaccccagatgtttcatggaaggcaattctactcgagacaagtagggttctgttgtcagttttgaaaatgtgtcttttttctttctttctttttttcattttaatgtcctatcttaagaaactaggcacgaaaaataagagttgggttaaatcataaagtaggaaataagataacaagggggttgatgctagtctggtggtagggggggatgaattgtaaagaacttgagagtttttattgtggttcggttcctcttttgccttgtaaatgtgagatgcttactcgttaactatcattcagagaaagtaaactgtaaaaattcaattttcttcttttttatttgcctagatttagaaggttctatccctgaaggatacaatttttgttcacttatgatgttatgtgtgtacatttgtgtcgaacaaggaggttgcttctcgtgtagttagctcaaaaatgttgccaccttaataggtgatatatactcagtagtgtgtta

SEQ ID NO: 604 - DNA, 3441 bp, Glycine max
atgagttgttattttctgaaactattttatgcacttttgttgcttttattgcatgctgcaggatccattcttggattcaacagcctttccaatagcgcagaaattaagtgcattgagagtgagagacaagcactcctcaacttcaaacatggcctcatagatggttttggcatgctgtctacatggagggacgatgacagtaacagagactgttgcaaatggaaaggcattcaatgcaacaatcaaactggtcatgttgagatgcttcatctccgtggtcaggatacacaatatttgataggtgcaatcaatatctcttcattgattgcccttgaaaatattgaacacttggatctcagctataatgattttgaagggagtcctatcccagaactcatgggctcgttcaccaacttaagatatctcaatctctctgattgttcatttgttgggagtattccttctgatcttggaaagcttacacatttactgtctcttgatctaggtaacaatatgtatctccatggacaaatcccttatcaacttggaaaccttatacatttacaatatcttgatctaagtgataattatctagatggggaactcccttgtcaacttggaaatctctcgcagttgaggtatcttgatcttgatgcaaattcattttcgggagcactccctttccaagttgggaatcttcctttgttgcacactcttggacttggtagcaattttgatgtgaaatctaaggatgtagagtggttgacaaatctgtcttgtttgacaaaactcaagctaagttcactacgcaacctttcctcttctcatcactggctacaaatgatcagcaagcttattccaaacttaagagagttgaggctatttgattgttctctttcagatacaaatattcaatctctgttttattcaccttccaacttttccactgctcttacaatccttgatctttcttcaaataagctgacatcctcaacatttcaactgttgtcaaactttagccttaatcttcaggagctttatcttcgtgataataacattgttttggcatctcctctctgcacaaactttccttctcttgtgatccttgacctttcctataataatatggcatcatcagtctttcaaggtggtttcaacttcagctcaaaacttcagaatcttgatttgcgaaattgtagtcttacggatggaagttttcttgtgtcatcttctttcaatatgagttcttcatcttctcttgtttcccttgatctcaactcaaatctgttgaaatcatcaactatattttactggctctttaactccaccaccaatcttcaaaaccttttccttaatgcgaacatgttagaaggtaccattccagatggatttgggaaagtaatgaactctcttgaagttctttacctctccggtaacaaactgcaaggcgagattccatctttctttggtaacatgtgcacattgcagaggttagacctctcaaataacaagttgaacggggaattttctagcttcttccgaaattcttcatggtgcaacagatacatatttaagagcttgtacttatcttataaccagattactggcatgttacctaaaagcattggattgttatcagagttggaggatctttacttggctgggaattctttggagggtgacgtcactgaatcccatctttctaatttttccaaattaaaatacttgcacctatcagagaactcgttgtctctgaaattcgtcccgagttgggttcctccattccaattaagatcattgggactcagatcttgcaagttgggccccacttttcctagttggctcaagactcaaacttctttgaattggcttgatatttctgataacgggattaatgactctgtaccagactggttttggaataacttgcaatatatgagattgttaagtatgtctttcaattatctcattggtgtaattcctaatatatcgtggaagcttccttacagaccatttatacttctgaattcaaatcagtttgagggtaaaattccgtcatttttactacaagcttcccagctgatgctctctgaaaataatttttcagatttgttttcattcttatgtgaccaaagcacagcttcaaatttgggcactttagatgtatcacacaatcaaataaaggggcaactcccagattgttggaaatcagtaaagcaattactgtttcttgatttaagcagcaataaattgtcagggaagattcctatgtccatgggcgcccttgttaatatggaagccttggttttaagaaacaatggtttaatgggtgagttgccttcttctttgaagaattgcagcagtttatttatgctggacctgagtgaaaatatgttgtcgggtccaataccatcatggattggacaaagtatgcagcaattgataatcttgaacatgcgaggaaatcacctctcaggatatctacccattcatctctgttatttgaaccgtattcagttgttggatctttcaaggaataacttgtcaagaggaattccaacatgcttaaagaatttgactgcaatgtctgaacagagcatcaactcaagtgacattgtgtctcgtatatattggcataataatacttacattgaaatttatggtgtttacggattgggaggttatacgcttgacataacatggatgtggaaaggtgtggaacgggggttcaagaatccagagttagagctcaaaagcattgatctttctagtaacaatttaatgggtgaaataccaaaagaggtcggatatttgcttggattagtttctttgaatctatcaagaaacaatttgagtggagaaattccttctcagattgggaatttaagttcacttgaatcacttgacttgtcaagaaatcacatctctgggagaattccttcttctctttctgaaattgatgatttgggaaaattagacttgtcacacaactctctttctggaagaatcccatcaggaagacattttgaaacctttgaagcctctagttttgaaggaaacattgatctttgtggtgaacaacttaacaaaacttgtcctggggatggagatcagacaacagcagagcatcaagaaccaccagtcaatggtgatgattcttttttctatgagggattatacatgagcttggggattggatacttcactggattttggggcttattagggccattactactgtggcgtccttggagaattgcttacatcaggtttctgaacagattaacagactatttcagctatacttactgtgaatcaaatttgtacatgagaagaagaatgcaagataccctatttgttcctagttactatcagtatatttgcacccttgtgttagaatgcctagctcggtcggatagcttgaaatcattggggctctga

SEQ ID NO: 605 - DNA, 1218 bp, Glycine max
atgggtgtgttaattctctttgtagccatatttgttgctctggttggctcgagtttgaatgtggacactgaaacagcagtgccagcagtttacatttttggggattccatttttgatgttggcaccaacaattttttgaatgattcaaaagccagggcagataataaaccttatgggattgattttcctaactcaaagccaactgggaggtttagcaatggctataacactgctgatcaaattgtgagattactaggattaaacgagagcccacctgcatatttgtatctagtcaacaatgatacagaaaatttcaacagctcgattcttaaaggcgttaattttgcttcaggaggatcagggattatggaagaaacaggaaaacaacactttatcgatgtagtatcgatggcagaccagatccaacagtttgcaaccgttcacggcaatatcttgcaatatctaaacgacactgccgaggctacaattaacaaatctctcttccttataagtgcgggaagcaatgacatatttgatttccttttgtataatgtgagtaagaatcccaacttcaatatcacacgtgaggttcaggaattcttcaacctgctaaggactacttaccatacccatctcaagaatctacacaaccttggagccagaaaatttgggatattaagtgttcctcctgtaggttgtgtcccaattgttaccaatggaactggtcactgtgtgaacgacattaatactcttgctgcactctttcacatagaaattggtgatgtgttggaaaatttgagctcagagttcccgggcatgaagtactcacttgggaattcatatgctattacctatgacatgataaacaatcctgacccacttcatttgagtaacgtgacatcagcttgctgcggaaatgaaacggttattgatggagtaccctgtggctccgatacccaagtatgcgaaaatcgcagccaattcttgttctgggaccagtaccatcccactgagcatgcttctcggatagctgctcataaactatatagtggtgggaaagaatatgtagcacccatgaatttcagtctattggttcaggaatagtcatcaattgaagacagagtttaaagcaagttggattttgttactttggttttctacactacttggattttgttatccaaggctcagtatacaatcaataaacaaacattgaag

SEQ ID NO: 606 - DNA, 1971 bp, Glycine max
gcattgtgagcatgaagccttgaatattctaacaggtttcttaactgataacccagatactgttttttattttcttaagcgagaaaaaaatagtgtgattaatctgaacaggtttttgtgaaatgggtgaaaattgtgtttttttttttgaaaggctgaaaaatggtgtttatagaagggaatgaataagagattaagagtcattcacactctcaagatttgtttggttgcacttttccgctttgttttttctgctgcttgaattgcatttgccatgtgttgcattgcagtgccaagatcttgaaagacaatgttgtttctgagtaatgagaacaccatgcagggggagatttcaaaggcttgagatgtcaatgttatttgcataatcaaaggttgatttggggagaggatggcatcttcatgggaatattttggggagattgcaaatgtggctcagctaacgggcatagatgcggtgaggttaattgggatgattgtgaaagctgcaaatacagcacggatgcacaagaagaattgcaggcaatttgctcagcatctgaagttgatagggaatttgctggaccagctaaagatctcggagcttaagaagtaccccgaaacccgggagcctctggagcagctagaagatgcccttagaaggtcttacattttggtcaatagttgtcaggaccggagctatctttatttgctggccatgggatggaacattgtttatcagttcaggaaggctcagagtgaaattgacagatacttgcaccttgttcctctcatttcactagtcgataataatcgagtcagggagagacttgaagttattgaaaaggatcaatgtgagtatacattagatgatgaagagcaaaaggtgcagagtgttattttgaaacctgagcccgaaaaagttgatgctgtggtgctgaagaaaactccttcctgttcttaccccaacttttctttcactgaagcacttaaaaaagaaaatgaaaaacttcaagtagagctacaacattcacaagcaaatatggatttacatcagtatgaattcattcaacatttactagatgtcacagaagttgcagctctttatcattctgaaaaaagtcacaagacagtagagtacagtgactacagtttttctgatgccaatggtgacaaaggtcattcttctaatgaaaaaatccacgaaaagaatgatactcattccacatcaagatcatcagtttcagaaaaggatcagctatcaactggaggctcatatcattgggaagattggcatactgatttacttgcctgttgttctgaaccttgtctttgtataaagacatgcttctatccttgtgggacattgtcaaagattgctactgttgcaaataacaggccaatatcttctgcagaaacatgtaatgaattgatggcatattcattaattttatcttgctgttgctatacttgctgcataaggaggaagcttcggaagatgttgaacatcagggggggctttattgatgattttctttctcatttgatgtgttgttgctgtgcccttgtgcaagaaaggagagaagtggagatccgtggtgttgaaggtcctgagaagaccaacacaagacctccaccctcacagtacatggaatcataaataaaaaatgaaattaacatttgcttgtttagggcttgaataacacataaattagagacaattaactattagaactgtcacgggaagccagtgcctatgtattttgattctcacaccactcggcatcaattattcgaatgtaaagtaggttgtctgttttatgtacccaaaagaaaaagtagcctcgaggtttagctgatggtgcatcacaatcttttttcctggtttaatatagtttcagctaatttatggcatttttttcatgatcattatgatatagtatcttcactttcactacttcattagactctgtt

SEQ ID NO: 607 - DNA, 3312 bp, Glycine max
atgagttgttattttctgaaactattttatgcacttttgctgcttttattgcatgctgcaggatccattcttggattcaacagccttcccaatagcgcagaaattaagtgcattgagagtgagagacaagcactcctcaacttcacacatggcctcatagacgactctggcatgctctctacatggagggacgatgacactaacagagactgttgcaaatggaaaggcattcaatgcaacaatcaaactggtcatgttgagacgcttcatctccgtggtcaggatacacaatatttgataggtgaaatcaatatctcttcattgatttcccttgaaaatattgaacacttggatctcagctataatagttttcaagggagtcatatcccagaactcatgggctcgttcaccaatttaagatatctcaatctctctgattctttatttggtgggagtattccttctgatcttggaaagcttacacatttactgtctctggatctaggtaacaattatttactccaaggacaaattccttatcaacttggaaatcttacacatttacaatatcttgatctaagtggtaattatctggatggggaactcccatatcaacttggaaatctctcacagttgaggtatcttgatcttggttggaattcattttcgggagcactccctttccaagttgggaatcttcctttgttgcacactcttggacttggtggcaattttgatgtgaaatctaaggatgcagagtggttgactaatctgtcttccttgacaaaacttaagctaagtttactacacaacctttcctcttctcatcactggcaacaaatgatcagcaagcttattccaaacttaagagagttgaggctatttgattgttctctttcagatacaaatattcaatctctgttttattcaccttccaacttttccactgctcttaccatcctggatctttcttcaaataagctcacatcctcaacatttcaactgttgtcaaactttagccttaatcttcaggagctttatcttggtgataataacattgttttgtcatctcctctctgcccaaactttccttctcttgtgatccttgatctttcctataataatatgacatcatcagtctttcaaggtggtttcaacttcagctcaaaacttcaaaatctttatttgggaaattgtagtcttactgatcgaagttttcttatgtcatcttctttcaatatgagttcttcatcttctcttgtttcccttgatctctcctcaaatctgttgaaatcgtcaactatattttactggctctttaactccactaccaatcttcataacctcgtcctttataataacatgttagaaggtcccattccagatggatttgggaaagtaatgaactctcttgaagttcttgacctctccggtaacaaactgcaaggcgagattccatctttctttggtaacatgtgcgcattgcagagtttagacctctcaaataacaagttgaaaggggaaatttctagcttcttccaaaattcttcatggtgcaacagatacatatttaaggggttggatttatcttataaccggttgactggcatgttacctaaaagcattggattgctatcagagttggaggatcttaacttggctgggaattctttggagggtgacgtcactgaatcccatctttctaatttttccaaattagaaatgttgtccctatcagagaactcgttgtctctgaaattggtcccgagttgggttcctccattccaattaaaatacttgggaatcagatcttgcaagttaggccccacctttcctagttggctcaagactcaaagttctttgtataggcttgatatttctgataacgggattaatgactctgtaccagactggttttggaataacttgcaatatatgagagatttaaatatgtctttcaattatctcattggttcaattcctaatatatcattgaagcttcgtaacagaccgtctgtacttctgaatacaaatccgtttgagggtaaaattccgtcatttttactacaagcttccctgctgattctctctgaaaataatttttcagatttgttttcattcttatgtaaccaaagcacagctgcaaattttgaaactttagatgtatcacacaatcaaataaaggggcaactcccagattgttggaaatcagtaaagcaattagtgtttcttgatttaagcagcaataaattgtcagggaagattcctatgtccatgggcgcccttgttaatatggaagccttggttttacgaaacaatggtttaatgggtgagttgccttcttctttgaagaattgcagcagtttaattatgctggacctgagtgaaaatatgttgtcgggtccaataccatcatggattggagaaagtatgcatcaattgataatcttgaacatgcgaggaaatcacgtctcaggaaatctacccattcatctctgttatttgaaccgtattcaattgttagatctttcaaggaatagcttgtcaagtggaattccatcatgcttaaagaatttgactgcaatgtctgaacagaccatcaactcaagtgacactatgtctgatatatatcggaatggtaagacttacgttgtattaaatggttacatattcggaggttatacgcttgacataacatggatgtggaaaggtgtggaacgggggttcaaggatccagagttggagctcaaaagcattgatctttcttgtaacaatttaatgggtgaaataccaaaagaggtcagatatttgcttgggttagtttctttgaatctatcaagaaataatttgagtggagaaattccttctcagattgggaatttaggttcactagaatcacttgacttgtcaagaaatcacatctctgggagaattccatcttctctttctgaaattgatgatttgggaagattagacttgtcacacaactctctttctggaagaatcccatcaggaagacattttgaaacctttgaagcctccagttttgaaggaaatattgatctttgtggcgaacaacttaacaaaacttgtcctggggatggagatcaaacaacagaagagggtcaagaaccaccagtcaaagttgatgattctgttttctatgagggattatacatgagcttggggattggatacttcactggattttggggcttattagggccattactactgtggcgtccttggagaattgcttacatcaggtttctgaacagattaacagactatgtatatgtatgcttatggtga

SEQ ID NO: 608 - DNA, 3771 bp, Glycine max
atgccaaccattaatccagttcgtttgaaattcatgcaagccataataatatttatgatgttgcaggttcttgtttctgctcaagaccaaattatgtgcattcagactgagagggaagcactcctccaattcaaggctgcccttgtggatgactatggcatgctctcttcttggaccacttctgattgctgccaatggcaagggattcgctgcagcaacctcaccggccatgtcctaatgctcgaccttcatagagatgttaatgaagaacaagtacgttatattagcggagagatccacaagtcgttgatggagttgcaacaattaaactatttaaacctcagttgcaattcttttcaacgcaaaggaatcccagagtttcttggttctctcagcaacttgagataccttgatctgtcatattctcaatttggcggaaaaattcccactcagtttggctctctttctcatttgaaatacttaaatcttgctgggaattctctggagggttcaatcccacgtcaacttggaaatctctcccagttgcagcatcttgatctctggggcaatcaacttgaaggaaatataccctctcaaattgtaaatctctcccagttgcagcatcttgatctcagtgtcaatcgatttgaaggaaatataccctctcaaattggaaatccctcccagttgcagcatcttgatctcagctacaattcttttgaaggaagtataccgtcccaacttgggaacctttcaaatttgcagaagctttatcttggaggatcacattatgatgatgatggtggtgctctcaaaattgacgatggagatcattggctgtctaatctcatttctttaacccatctttccttgctctccatatctaatctcaacacttctcatagctacccccaaatgattgccaagctaccaaaacttagagaactgagtttaattgattgtagcctttccgatcagtttatcctttcagtgaggctctctaaattcaatttttctagttccctttccattcttgatctttcctcgaacaacttcacgtcatcaatgattctccagtggctgtccaacgtcactttcaaccttgttgagcttgaccttagttataacctcttggagggttccacattaaaccattttggccgtgtaatgaattctcttgagcacctcgacctctcatataatatattcaagggtgaggatttgaaatccttggcgaatatatgcaccttacattctttatacatgccagcaaacaatttgactgaagaccttccatcaatccttcataatttgtctagtggttgtgttagacactcattacaagatttggatttgacatataaccaaatcaccggctctttacctgacatttcagtattctcatctctaaaaacattggctcttgatatgaatcaattaagtggaaatatacctgaaggcctccgcttaccacttcatttgaaatctctgtcaatccaatcaaactctttagaaggtggaattcccaaatcattagggaatgcatgtgctttgcgctcattggacatgtctgataatagcttgagtgaagagtttccaatgataatccatcacttgtctggatgtgccagattctcgctgcaagaattgaacttagaaggaaatcaaatcaatggtacgtttcctgacctttcagtattttctgccttgaaaagattggatctttcagaaaatcaattaaacggaaaaattccagagaggaacaaattgccgtctctgttggagtctttgtcaatcgaatcaaactctttagaaggtggaattcccaaatcatttgggaatgcatgtgctttgcgctcattgtatatgtctaataatagcttgagtgaagagtttccaatgataatccatcacttatctggatgtgctagatattcattggaacaattatatctaggcatgaatcaaatcaacggcacactacccgacctctcaatattctcatctttaagagaattatatctttatggaaacaagctaaaaggagagatttctaaagatattaaatttccacctcaactgaagagactagatatgcaatcaaattccttaaagggtgtgctcactgactatcatttcgctaatatgtctaacttagacttattggagttatctgacaactctttattggccttggcatttagccaaaattgggtcccaccatttcagttgagccacataggattgcgatcttgcaagctaggtccagtatttcccaaatggttggagacacaaaatcaaatttgggatattgacatttcaaatgctggaatagcaggtatggttccaaagtggttttgggctaacttagcattccgagaatggatttcaatgaatatttcatacaataatctccatggtataattccaaattttccaataaagaatctttacacctccataattcttggatcaaatcaatttgatgaccctattccaccatttctgcgaggttccgtgtttcttgatttatccaaaaacaaattctcagattctctttcatttttatgtgtgaatgatacagttgaaaatttataccaattagatctttcaaataatcatttctctggaaaaattccggattgttggatccatttcaagtcattatcttatttggacttaagtcacaataatttttctggaaggatacctacatccatgggatctcttcttcatcttcaagcattgctattgagaaacaacaacttaacagatgagatacctttctccttgaggagttgcacaaatctagtaatgctagatattgcagaaaatagattatcaggacttatccctgcttggattgggagcgaattacaggagttgcaatttttaagtttgggaagaaataatttccatggaagtttacctttgaaaatttgctacctaagtaagattcaactcttggatctctcactaaacagcatgtctgggcaaattcctaaatgcataaaaaattttacttcaatgactcaaaagacatcttcaagagattatcaaggtcattcatattttgtcaaactcaattactcttcaagtcctcaaccatatgatttgaatgcactcttgatgtggaaaggttcagaacaaatattcaaaaataatgggttactacttctaaaaattattgatctctcaagcaatcacttttctggagaaattccactggaaatagagaatttatttggattggtttcattgaatttatcaagaaacaatttgatagggataattccctcaaaaatcggaaagctaacatcacttgaatctcttgatttgtcaagaaaccaattggttggttcaattgctccaagtcttactcaaatttatggactcggtgtgttagatttgtcacataactatctaactggaaaaattccaaccagcacgcagttacagagttttaatgcctcgagttatgaagataatcttgatctttgtggaccgcctcttgagaaattgtgtattgataaggggctagcacaagaaccaaatgttgaagttccagaggatgaatattcacttttcagtcgtgaattttacatgagtatgacatttggatttgttataagcttttgggtggtgtttggctcaatcttattcaagcgttcttggagacatgcctatttcaagttcttgaaaaatctatcagacaatatttatgtcaaggtcgcagtatttgctaataaaatatcaaaggtgcatgactga

SEQ ID NO: 609 - DNA, 3771 bp, Glycine max; identical to SEQ ID NO: 608

SEQ ID NO: 610 - DNA, 1632 bp, Glycine max
tttatttatgtaagtagttgtatgaacattctctttgaacctctcgacttaactcaccttaaattttatttaagaaaaaaaaaccataaacttggggggagccttcaaacctactacaaatctctctcccagagtcccttgagagaagctcctaacaaacaaaacgaaaccatacttttgaagtttcgcagtcgcaatctccatatttgaatgcataaatcaattcaattctgaatctgaaagttcccatatgtcaacggaagcgcccaagcgcgaccaatggcagtgggagaacgccaccgccggcgccgccgccggattcgccactgtcgccgtcatgcatcccctcgatgttgtccgaactaggttccaagttaacgatggtcgagtctctcatcttcctatttacaagaacactgctcacgccgttttcgccatcgctcgctctgagggattaagagggttatatgcaggctttcttcctggggttcttgggtcaactatttcatggggtttatatttcttcttctatgacagagccaaacagagatatgcaaggaacagggaggagaagttgagcccaggtctgcaccttgcctcagctgctgaagcaggagctttggtttccttcttcacaaatcctgtatggctagtaaagacaagattgcagcttcaaactcctcttcatcagacacgaccatactctggggtttatgatgcatttaggaccataatgagggaagaaggatttagtgcactttacagagggattgttcctggtctatttctggtctctcatggtgctattcagttcacagcatatgaggagctacgcaaggttattgttgattttaagagtaagggaagtacagtgcataatcaaaaccctgataaattgctgaattctgttgattatgccgttcttggagcaacatcaaaactggctgcagtacttctaacctatccatttcaggttatacgggctcgattgcagcaaagacccagtggtgatggggttccaagatatatggacacgttgcatgttgtgaaagaaactgcacgatttgaaggtatccgaggtttttacaaaggaattaccgcaaacctcttgaagaatgctcccgcttcttcaataacatttattgtttatgaaaatgtcctaaaattgcttaaaccagcaagaaggaatgactgagtatttcattttccttcatgattctttcctttctccttgtgtttaatctcctttcttatttgatattttttgtagcattgaaaaattgctcatttttcccatcactttttaatgatgggattctacacaatctaacaacgtggatgcagcaatttctggagataaaaatcatggttttttttatatccgtgttccatctccttcatgctaaccaagttttctgttcttttcctcccagagtgtgttctagggcttgaaattaccatttatagccaaaagatcgtaggtctattgaaccttcgtaggagaaaatattccgtttccattgaacagaaacgcttattattacaaaacaaaagcaggcattatataccggtttcctttaaaagtatgcttctttcacatttccttctgctgtgatttcagtttttgtattg

SEQ ID NO: 611 - DNA, 222 bp, Glycine max
atggcatcatcttggaccccaaggcaaaataaacaatttgaaagagccctggctaaatatgatagagaaaccccagatagatggcagaatgttgctaacgaggtgggaaaatcggttgaggaggttaaaaggcactatgagatcctcaaagaagatatcagacgcattgagcgtggtcaagtggcattcccctacagaacaaacaattctaacagtaattaa

SEQ ID NO: 612 - DNA, 690 bp, Glycine max
ctaattgtaacccctccaatatttttcctccctacttataagggactagcttggttattgttttcccataccatagctcgactgaagcaatcatttcttctctcttctttccagtttgtgacactcactaagccacttccattcttctaaagtctttattccactctcctacttagcctgttaatattaccattgcttaagactgttgaaacttcatcttcatacattcaaatggcatcatcttggaccccaaggcaaaataaacaatttgaaagagccctggctaaatatgatagagaaaccccagatagatggcagaatgttgctaacgaggtgggaaaatcggttgaggaggttaaaaggcactatgagatcctcaaagaagatatcagacgcattgagcgtggtcaagtggcattcccctacagaacaaacaattctaacagtaattaaggcattgtgttgaacagcacaggtcatcgatccagaacccaacaaacttgaagactcatgaagattacaatcacatccgcaataacttaacaaataaaaggaagtaccatcagcagtgaacaatataaaagtttatctgtaagcaaccatgtgattgctattgttaaaaaaaaatgtattaagtagatgtatttacaaattaatcatgtttatgaaccagtactaattattaataaa

SEQ ID NO: 613 - DNA, 1868 bp, Glycine max
aacgattcctggtccacacttcgtctcctatataaacatgtgtttggaattcaagaaaattggactcaaaatcaaatcaaatcaccttaagtagtcttttactcctagagaaattttgtagatactagatagagaggaagccaaagacaccttgataagtattattataatggagcatggtggcaaagaagaccagacgacgacgttcaacaaatatgcctttgcttgtgctgttgttgcttcaatggtatccatcatatctggctatgacactggcgttatgagtggagcaatgatattcatcaaggatgacattggaatcagcgacacccaacaagaggttctagcaggaatcttgaacctatgcgcattggtggggtctttggccgcaggaagaacctccgattacattggtcgccgctacacaatcttgttggcctcactcctcttcatggttggtgcaattctcatggggtatggtccaaactacgcaattctaatgcttggaaggtgtgttggtggtgttggtgtaggctttgctctcatgatagcaccggtttattcagcagagatctcctctgcatcgtcaagggggtttctaacctcgttacccgagctttgcatcggcattgggatcttacttgggtacatatcaaactacttcttggggaaattgactttgaggctaggatggagattgatgcttggtgtagcagcacttccctcgctcgctttggccttggggattctggcaatgccagagtccccaaggtggttggcgatgcagggaaggcttgcggacgcaaagaacgtgttcttgcgtgtctccaacaccgaacaggaggccgaactccgattcggtgaaataaaagttgtgatggggtttaatgattgtgaagtcgaggagaaaaatgtgaagccctcttacaagtctcaaggggaaggggtttggaaagagttgctggtgagaccgacgccaaaagtgcgttggatgctgattgcagccgtggggattcatttcttcgagcatgcaacgggcattgaggctgtgatgttgtatagtccaagaatcttcaagaaagctggtgtcactagtaaagataagcttcttcttgcaacggttggtattggcctcacaaagatcattttcttggtcttggctttgtttttgcttgacaaagttggtagaaggcgtcttttgcaaatcagcactgggggaatggtttgtgggctcacacttttgggttttagtttgactatggtggatagttctagtgaaaagctcttgtgggctttgagccttagcattggggccacttatggttatgttgctttctttaatgttgggcttgggcctgttacttgggtctatgcgtcggagatatttcctttgaagttgagggcgcaaggggctagtataggagttgcagtgaatagaaccatgaatgcagtggtttccatgagttttatttcggtgtacaaagcgatcactataggtgggagctttttcatgtttgctggaatatctatagtggcttgggtgttcttctactttttccttcctgaaaccaaaggcgtgcccttggaagagatggagatggttttcagcaaaaaatccagtgggaaaaatgtagcaatagaaaatggtccaagatagaaagtgtagtgtgttatagtgttacagtgagaaaaaccatttgagagaataggtgtgattatgtagcattctgggctacatgctgtaaaattcaacacactagattttatgtattgttcaaccaagatccatgagcctgacatcattttctttgcatcgctaagtcaaaaattcaacaaaatgaatgggcataaaaaaacatgaaagtcca

SEQ ID NO: 614 - DNA, 1946 bp, Glycine max
gtgtaacctttaaataatagatccgatccggttcggagaacaaccgaacgaggttttctttctttctgccgctcaaatacggagagagagaaattgttgaagaagcttttctacttcgagcatttttattatttaattttgtttggttttagggtttgagaatcagcactgtgtcacgatgtccaatcatcaccgttcttcctctaagaacggccttccacctcaagaactccttgacgatctctgcagccgatttgtgctaaatgtgccaaaggaagatcttcagtcatttgaaaggatcttgtttcttgtggagaatgcacattggttttatgaagataattccgtagaaaataatccatctctgaagtcattaaatctgaaggagttcacttctttattgttcaatagctgtgatgtttttcagccttatgtggcccatatagatgatattttcaaggacttcacttcctataaggttcgagttcctgtaactggggcaataattcttgatgaaacatatgaaaggtgcttgctagtgaagggatggaaaggtacaagttggagtttccctcgtggaaaaaagagcaaagacgaagaagatcatgcatgttccattagagaagtcatggaagaaacaggttttgatgtttcaaaacttctgaacaaggatgaataccttgaagttatttttggacaacagagagtgaggctttacattattgctggagtgaaagatgatacggcatttgctcctcttaccaaaaaggaaatcagtgaaattgcatggcaccggcttgatgatcttcaaccagcaagtgatgaagtgatatctcgtagcatcaccggccttaagctttatatggtggccccatttctggcatcattgaaatcgtggatttcaatacaccaccctgcaatggctccaaggcccgatttgcctcttaaaggtaactcctatttccccccaaacactggtcggttttaaatgcctgaggtcatagggtgtagtttagttactcgatgcttggctgtgttgggatgagttaatctccagcagctagttcaatctgttgcactacattatgtgcatcgcagccttgcaggacctaatctcgaccactgaggtaccgttgacttgagaggctgaggcattagaattgagatgtgttagtattgaattgtaagctacgatattgtgcagatttctttgcttggaaagcttttcagtgcaccatttgtcaagggattcaaaaggaaaaatcaactgtcaatgaacttgcataagtgttacttgttccaaatttagtactgcaacgcattcctagtttgatcctttgtacattttccaaactgtacattcttcttacattagttaggaatgctaacaatcctttacttttgtgaaggaatttgcgtctggaaagcaaaacccggttctattggaagtagctccacagtaatggatatccagccaacaaaacctgaacctgattctcacacccttgacatggggcctggcaagagctttcggaatttcagatttgatactgccttgattttacaagcaatggaagcttccttttcttcttgaaagtccagcaacctttatgtaaagtttcacgtaactgaattgatttcccctctttcattggtagtattcactatccatgctaattagtttgttgctgtacatcatgttcctcaagttgtctggttgattgaataatatgtatattgtgtacaggaagtatttgtacctaaatagttttctcagttagtgtggtattatctgtaaaactagagtaaaggttcaatgtaaaagttagactactccctacatttgaactcattcagactccgggtctcgggcagaattaaaccgatttatttggtaatgccattataaatctgtacaaagtggctactttatggttactgattac

SEQ ID NO: 615 - DNA, 2203 bp, Glycine max
aaattaaaaagtttgccacagagtagtgactattttgtgggagaaataaaaaggtttcgtattaaagaagaataataataaaggggtttggactaatccgtggcggctccttcacacgagttattaccgcatcatctcttatgtcatatcatgcaaatgtgaatgcaatttttttctctttagtatatatactctctgcatactaatagtattgttttttatttttttcgtttcttctttcgcaaacctaattactgctattacgagacgacgcagatttagttcggattgttcgattgcgatggctaggaagatgcttatcgatggtgaagctgaattggctcaaggtggtggagaagaagtgtcgaattttgacttcgacttgtttattattggggctggaagtggtggcgttcgtgccgctagattttcatccaattttggagctaaggtggggatttgtgagcttccatttcatccaattagttcagaaacaattggaggagtcggtggaacgtgtgttattcgtggttgtgttcccaaaaagattttggtctatggagcatcttttggaggtgatcttgaggatgccaggaattatgggtgggagttgagtgagaaagttgacttcaattggaagaagctcttgcaaaagaagacagatgaaataaacagattaaatggactttacaagcggatgttatccaattggggggttaaattatttgaaggcgagggaaagatagttggtccaaatgaagttgaggtgacacaattggatggcactaaattgtcctacacagcaaagcacatattgattgcaactggcagcagggctcaacgtccaaatattcctggacaggagttgggtataacatcagacgaggcactaagtttagaggatcttccaaaacatgctgtggttcttggaggaggttatattgcagttgagtttgcatctatatggcgtggcatgggttccacagttgatctagttttcagaaaggaacttccactgagaggttttgatgatgaaatgagagctgcagtggcaagaaatcttgaaggcaggggaattaatttgcatccaaggaccaatttgacacagttgatcaaaacagaggacggcattaaagttattacagatcatggtgaagagctgattgcggatgctgtactgtttgccactggtagggctcctaattctaagaggctgaatttagaaactgtaggtgttgagcttgacaacactggagcaataaaggtggatgagtattcccgcacaagcatacctagcatatgggctgtgggtgatgtcacaaaccgaatgaatctaactccggtggccttgatggaagcatcgtactttgctaaaactgtatttggtgggcaaacaatcaagccagactacagtaatattccctatgcagtgttcagcattccaccactttctgtagttggtctcagtgaggagcaggcaatagagcaaaccaatggggatctgttggtttttacatcaaccttcaatcctatgaaaaataccatctctgggcgacaagaaaaaactgttatgaagcttgttgttgatgctgagacagataaggttctcggagcctcaatgtgtgggcctgatgcacctgaaattatgcagggtattgctgttgcgttgaagtgtggagctaccaaggcacagtttgatagcacggtgggaatacacccatcggctgcagaagaatttgtaaccatgcggtcagtgacaaggcgcgtagctggaactggaagtgtcaaacccaagaccaatttgtaaaatgtttaaaatgaaaatacgatctgcttgatggttgtgtaaagatgcaaatgacttcttttggtgaccttcccattatagtatagatcacaaacacatctgtttttctttcccaataaaatgtttgtttcttttttctttgcgccattttatttaaaacagtttgatttgttgccatataatctaagaacgagtgatatagactgatatgcatacatatgtgtgtgtgtgtgtgtgagagagagagagtgatccgagtcattctccatggctagttgctttagttgtgcgctgcctttagcttcatagaagatatatattggagatcggaagaatatcttttcttgtgtattatggattgattgacacattttatttatgtatgtgaaggctgaa

SEQ ID NO: 616 - DNA, 1662 bp, Glycine max
tttctgcttttggttttttgtctttctttcaacagtgtatttttagggttcacctctaccccttgctgatgtttattttatttttgttaaataaaacttcagtttcgattctaaattgttgccggctccagcaacctctgccaagtaagttcctcatttccctttagtgcaggtctttaatgggtgtgattgatttctacaacactggtgctttgtgctgggttaagtccaacgccaatctgaagcagcaagtgggtttggcaccaagacccatttgttcatttgaggggaataatcagaggaagtttgtggcaatggcttctaccgttcctgtggagcaagtcaacaatggccccctgcaggtgacaggtgactccttcatcagagagcatctgaggaagttggctccttatcagcccattttgccctttgaggttttatcagctcgccttggacgtaagcctgaggatatcgtgaagttagatgctaatgaaaatccttatggtccccctccagaggtcatggaagccctaggatcaatgcaattcccatatgtctatcctgacccagagagccgcagattgcgcgcagctcttgcccatgattcaggccttgaagctgaatatattcttgcagggtgtggtgcagatgagcttattgatttgatcatgcgttgtgtgctggatcctggagacaagattgtggactgccctccgaccttcacaatgtatgaatttgatgctgcggttaatggagcacttgttatcaaagttccaaggaggccagatttcagcttgaatgttgaacaaattgctgaagttgttaaacaagagaagcccaaatgcatatttttaacatctccaaataatccagatggaagtataattgatgacgaagttctcttaaaaatactcgagcttcctatattggtgatactggatgaagcatacattgagttttcagcaattgaatcaaggatgagttgggtgaagaaacatgataatttgattgttcttcggacatttagcaaaagagctggtttagctggacttcgagtgggatatggagcttttcctttgagtataattgagtatctttggagagcaaagcagccgtataatgtatctgttgctgctgaaatttctgcatgtgcagcattgcaaaatcctacctatctagagaatgtaaaaaatgctttgttgaaagaaagagggagactttatgaccttttgaaagaagttccattcctccggccatttccaagccattctaacttcattctttgtgaggttacatcaggaaaggatgcaaagaagctaaaggaggacctagcacaaatgggtgtgatgattcgtcactatgacaagaaagagctgaaagggtacgttcgtgtgactgttgggaagcctgaacaaacagatacacttatgaagtgcctcaagagactctcgtaggaggaaaatttgatgtaataaatattgtaacacgtcatgctaaactcctcttagctaatctttatatagagccgtcaaaattagaagaaaatatgttgattttggcaagggatgtggacgtagctttatatatttttgacctaaatctaccatgataaatattgtgttttgcaatttcttgaagtggcatcactttgtttgtatgctt

SEQ ID NO: 617 - DNA, 2799 bp, Glycine max
atgggcaggtttgagtatatccccacttctttcctcagtattttgttcattttttgtttctgtcccatggtgttgtccctgctgtctcaaaaccaaacaaaaaccatgatcaatctctcaaagaaccttcctccccctgttccatggaatgcctcatacccaccatgttcatggatgggagtggattgtgaccctaccaattcttctatagtagggatatctttaattcggtattcactgtctgcttctgactttctgccacttgtttgcaaaattcaaactttggagcattttgatgtctccaacaaccgtctgagctcagtcccagatggtttcatcaccgagtgtggaaagattaaggggttgaaaaagctgaatttcagtggaaacatgttagggggtgatttaccatcttttcatggttttgatgcattggaatcccttgatatgtccttcaataatttggaagggagtattggtattcagttagatggattggttagcctcaaaagtttgaatcttacttccaataacttcggtgggtctattcctaccaaactaggaaattccacggttttggagcatcttgtgctttctgtcaatcagtttggtggaaaaatccctgatgaattattgagttatgaaaacttgaccgaggttgattttagggcaaatcttctctcagggtccattcctagcaatattgggaagctttctaacctggaaagtttggttctttcctctaataacctcactggtgaaattccagcttcccttttcaacctcacaaagctttcaagatttgaggcaaatcagaacaatttcataggtcctgtacctcctgggattacaaatcatctcacgagtttggatcttagttttaataatttgtctggacccattccagaagaccttttatccccatcacagttgcaggctgtagatttgtcaaataatatgttaaatgggtcggtgcctacaaatttttctccaaacttgttcaggttaaggtttgggagcaatcatctgagtggaaacattcctccaggtgcttttgcagcagttccaaatttgacatacttggagctggataacaatgacttgaccggaaccataccggctgaattggaatcatgcaggaaattggcgttgttgaatttagcacagaatcacttgactggtgtattgccaccactgcttggcaatcttaccaatcttcaagtcttgaagcttcaaatgaacaagcttaatggtgcaatccctattgaaattggccaacttcataagttgtcaatactgaatttgagctggaattctctgggtggatcaattccatctgagattacaaatttgagcagtcttaatttcctgaacttgcaaagcaacaatctgagtggttccataccaacatccattgaaaacttgaaatttctaatagaactccaactcggggaaaaccagctaagtggtgtgataccaagcatgccgtggaatctgcaggcgtcactgaatcttagtagcaaccaccttagtggtaatattcccagcagttttggtactttggggagcctggaagtcttggatctctcaaataacaaattatctggtccaattcccaaggaactaactggaatgtcaagtttgacacagttgttacttgccaacaatgcactgctgtctggtgaaattccaaaattcagtcaacatgttgaagttgtatattctgggactggtctgataaataatacttcacctgacaacccaatagccaacaggcccaacactgtctctaagaagggaatatctgttcatgtgacaattctcattgcaattgtagcagctagttttgtttttggcattgtcattcagctggttgtctccagaaaaaattgttggcaacctcaattcatccaaagtaatttattaactcctaatgcaattcacaaatcaagaattcacttcggtaaagccatggaagctgttgctgatacatcaaatgttactttgaaaacaaggttttcaacgtattacactgccatcatgccctctggatcaatctattttatcaagaaactagactgttctaacaagatattgccattgggaagtcatgataaatttggaaaagagctagaagtctttgcaaaattgaacaattcaaatgtcatgactcctttggcctatgttctgtccattgatactgcttatatactatatgaatatatctcaaatggctccctctatgatgttcttcatggaagcatgttagattggggtagcagatatagtatagccgttggggtggctcaaggactttcttttcttcatggatttgcctctagtccaatactactccttgacctatcaagtaaaagtattatgttgaagtccctcaaggagcctcaagttggggatgttgaactctaccatgtgattaatcccttaaagagtacagggaatttttctgaagttgttggttctgttggttatattcctccagagtatgcatacacaatgacagtaacaattgctgggaatgtctacagttttggtgtcattctgcttgaactgctgacaggagaacctccggtgacagatggaaaagaattggtcaagtgggttttggatcattcaacaaacccacaatacattcttgattttaatgtcagtagatcatcacaagaagtcagaagccagatgcttgcaattctcaagattgctcttgtttgtgttagtacatccccaaaggcaagaccaaatatgaacactgtgcttcagatgcttcttaatgttggatga

SEQ ID NO: 618 - DNA, 3339 bp, Glycine max
ttcgatctcacattgtcacacaactctttgtttgtgcagtgaaagacctgcaatgtcagtcaactccactcccaaacactttgttcttactctctttccaccaaccttccttcaactccaaacatatcctaaatttattctgttgcagacacttcccaacattctcttcttgttctatcccccatgttgttgtttctcttcaccctcaatccagttcaaataaaatactcactcacacaccccaaatagatacacatatattcatataatagtgaagcctaatcacagttcaaaactcagtaccagacactgctaagaacatgggcaggtttgagtatatccccacttctttcctcagtattttgttcattttttgtttctgtcccatggtgttgtccctgctgtctcaaaaccaaacaaaaaccatgatcaatctctcaaagaaccttcctccccctgttccatggaatgcctcatacccaccatgttcatggatgggagtggattgtgaccctaccaattcttctatagtagggatatctttaattcggtattcactgtctgcttctgactttctgccacttgtttgcaaaattcaaactttggagcattttgatgtctccaacaaccgtctgagctcagtcccagatggtttcatcaccgagtgtggaaagattaaggggttgaaaaagctgaatttcagtggaaacatgttagggggtgatttaccatcttttcatggttttgatgcattggaatcccttgatatgtccttcaataatttggaagggagtattggtattcagttagatggattggttagcctcaaaagtttgaatcttacttccaataacttcggtgggtctattcctaccaaactaggaaattccacggttttggagcatcttgtgctttctgtcaatcagtttggtggaaaaatccctgatgaattattgagttatgaaaacttgaccgaggttgattttagggcaaatcttctctcagggtccattcctagcaatattgggaagctttctaacctggaaagtttggttctttcctctaataacctcactggtgaaattccagcttcccttttcaacctcacaaagctttcaagatttgaggcaaatcagaacaatttcataggtcctgtacctcctgggattacaaatcatctcacgagtttggatcttagttttaataatttgtctggacccattccagaagaccttttatccccatcacagttgcaggctgtagatttgtcaaataatatgttaaatgggtcggtgcctacaaatttttctccaaacttgttcaggttaaggtttgggagcaatcatctgagtggaaacattcctccaggtgcttttgcagcagttccaaatttgacatacttggagctggataacaatgacttgaccggaaccataccggctgaattggaatcatgcaggaaattggcgttgttgaatttagcacagaatcacttgactggtgtattgccaccactgcttggcaatcttaccaatcttcaagtcttgaagcttcaaatgaacaagcttaatggtgcaatccctattgaaattggccaacttcataagttgtcaatactgaatttgagctggaattctctgggtggatcaattccatctgagattacaaatttgagcagtcttaatttcctgaacttgcaaagcaacaatctgagtggttccataccaacatccattgaaaacttgaaatttctaatagaactccaactcggggaaaaccagctaagtggtgtgataccaagcatgccgtggaatctgcaggcgtcactgaatcttagtagcaaccaccttagtggtaatattcccagcagttttggtactttggggagcctggaagtcttggatctctcaaataacaaattatctggtccaattcccaaggaactaactggaatgtcaagtttgacacagttgttacttgccaacaatgcactgctgtctggtgaaattccaaaattcagtcaacatgttgaagttgtatattctgggactggtctgataaataatacttcacctgacaacccaatagccaacaggcccaacactgtctctaagaagggaatatctgttcatgtgacaattctcattgcaattgtagcagctagttttgtttttggcattgtcattcagctggttgtctccagaaaaaattgttggcaacctcaattcatccaaagtaatttattaactcctaatgcaattcacaaatcaagaattcacttcggtaaagccatggaagctgttgctgatacatcaaatgttactttgaaaacaaggttttcaacgtattacactgccatcatgccctctggatcaatctattttatcaagaaactagactgttctaacaagatattgccattgggaagtcatgataaatttggaaaagagctagaagtctttgcaaaattgaacaattcaaatgtcatgactcctttggcctatgttctgtccattgatactgcttatatactatatgaatatatctcaaatggctccctctatgatgttcttcatggaagcatgttagattggggtagcagatatagtatagccgttggggtggctcaaggactttcttttcttcatggatttgcctctagtccaatactactccttgacctatcaagtaaaagtattatgttgaagtccctcaaggagcctcaagttggggatgttgaactctaccatgtgattaatcccttaaagagtacagggaatttttctgaagttgttggttctgttggttatattcctccagagtatgcatacacaatgacagtaacaattgctgggaatgtctacagttttggtgtcattctgcttgaactgctgacaggagaacctccggtgacagatggaaaagaattggtcaagtgggttttggatcattcaacaaacccacaatacattcttgattttaatgtcagtagatcatcacaagaagtcagaagccagatgcttgcaattctcaagattgctcttgtttgtgttagtacatccccaaaggcaagaccaaatatgaacactgtgcttcagatgcttcttaatgttggatgaagtcaaattctttagtattggaatatatcttgaagagagattttttgtaatttttggatgatgctttaagtcaagaaaatatgaaaggtagacatattacaggacaaagttggcttaattattttatggtgtgttaccagtgtaagtaaaactagtaccgtacatataagatataacttatacatataaaagtatacttttgttttctacatacttgtat

SEQ ID NO: 619 - DNA, 1701 bp, Glycine max
atgaaaatgtggcttggcaagaaaattatcttccttcaaactctgctttgtttttccatagttggaaccaattcccatggattgaaggaataccattttgttctgaaagaagctcattatagaagactctgcagctcaaaacccatattgacagtgaatggacaatttccagggccaactgttagagcctactatggtgaaacgatatatgtcaatgttcacaacaagggaaaatacaacatcaccttgcactggcatggagtgaaacaaccaaggaatccatggtcagatggccctgaatacatcacccagtgccccatcaaacctggtgggaaattcaggcagatgttgattttttctattgaggaaggaaccatatggtggcatgctcatagtgactgggcaagagccactgtccatggagctatctatatttatccaagaaagggtgaatcctacccttttcccacacctgatgaagaagtgcctattgtattaggagaatggtggaagagtgatgtcagcgatgtgtatgaggaatttctcagaaatggaggatccccaaatgaatctgatgctatcacaataaatggtcaacctggtgatctctatccttgctccaaatcagaaacattcaagttaaatgtgcactatggcaagacttatcatctgcgcatggtcaatgctgcaatgaatctcgttctcttttttgccgtttcaaagcacaatctcacagttgttggtgttgatagtgcctactctaagccattaacaagagattacatatgcatagctccaggacaaacagctgatgtattattgcatgccaaccaagagcctaatgactactacatggctgcaagggcatattcaagtgcacttggagttgcctttaataatggcataaccacagctaggatccactatcatgagaatcatgctccaaacaaatctccttcattaccttatctccctctttacaacgacacaaaagcagtttttgactactatgttagcattaagggcttaaatgaagcagacccctatcaagtccctacaaatatcaccactcatatgctaaccaccctttcaattaacacatttccatgccctgaaaaccaaacctgtgcaggaccaaatggaacacgtttagcttctagcgtgaacaacataagttttgaaaaccctaccattgacatactagaagcctattactaccacatcaaaggggtgtatcacaaggggttaccaaaatttcctcctttgaaatttgactttaatgcagagtatttgcctctagaacttcagataccaaagaaaggaaccaaggtggctgttattaaatttggttcaacagttgaacttgtttttcaagggacaaatttggttactgggatagaccatcctatgcatctgcatggcactagtttctttgctgttggatatgggtttgggaattttgataaacacaaggaccgcaagacatacaatctcattgatcctccccttatgaatacaatactagtgcccaagaatggttgggccagcataaggtatagggcttctaacccaggagtgtggtttgtgcattgccatctagaccgccacctctcttggggcatggagactgtgtttattgtgacgaatggggaaggagatgctgaaatactacctcctcctccagatatgccccagtgttga

SEQ ID NO: 620 - DNA, 1676 bp, Glycine max
atttttagaacattgcaactaatctgagggaaggcatggagtgaaacaaccaaggaatccatggtcagatggccctgaatacatcacccagtgccccatcaaacctggtgggaaattcaggcagatgttgattttttctattgaggaaggaaccatatggtggcatgctcatagtgactgggcaagagccactgtccatggagctatctatatttatccaagaaagggtgaatcctacccttttcccacacctgatgaagaagtgcctattgtattaggagaatggtggaagagtgatgtcagcgatgtgtatgaggaatttctcagaaatggaggatccccaaatgaatctgatgctatcacaataaatggtcaacctggtgatctctatccttgctccaaatcagaaacattcaagttaaatgtgcactatggcaagacttatcatctgcgcatggtcaatgctgcaatgaatctcgttctcttttttgccgtttcaaagcacaatctcacagttgttggtgttgatagtgcctactctaagccattaacaagagattacatatgcatagctccaggacaaacagctgatgtattattgcatgccaaccaagagcctaatgactactacatggctgcaagggcatattcaagtgcacttggagttgcctttaataatggcataaccacagctaggatccactatcatgagaatcatgctccaaacaaatctccttcattaccttatctccctctttacaacgacacaaaagcagtttttgactactatgttagcattaagggcttaaatgaagcagacccctatcaagtccctacaaatatcaccactcatatgctaaccaccctttcaattaacacatttccatgccctgaaaaccaaacctgtgcaggaccaaatggaacacgtttagcttctagcgtgaacaacataagttttgaaaaccctaccattgacatactagaagcctattactaccacatcaaaggggtgtatcacaaggggttaccaaaatttcctcctttgaaatttgactttaatgcagagtatttgcctctagaacttcagataccaaagaaaggaaccaaggtggctgttattaaatttggttcaacagttgaacttgtttttcaagggacaaatttggttactgggatagaccatcctatgcatctgcatggcactagtttctttgctgttggatatgggtttgggaattttgataaacacaaggaccgcaagacatacaatctcattgatcctccccttatgaatacaatactagtgcccaagaatggttgggccagcataaggtatagggcttctaacccaggagtgtggtttgtgcattgccatctagaccgccacctctcttggggcatggagactgtgtttattgtgacgaatggggaaggagatgctgaaatactacctcctcctccagatatgccccagtgttgaagaatatttcatagtaaagaaaattccacatggcacggttgttttaactcaggctttgagaattgtatttgaagatttaatagaataaagttttgcatatgttgagtttttatgataaggaaaatgttgcatatatagagaactttatactactgcttaaagaagaaataagagtacccccttcggactaaattat

SEQ ID NO: 621 - DNA, 345 bp, Glycine max
atgtatttgtctttttctaaaatatccttaaaaaacacactccttttgttcactccccgcaagtttctttccgtgaaatccctattgagagcgcaacaacaacacacaccatcaacaaggacgaagacttgcttcaagttggtaggagaattgccatttgtggacaaagaggatacccaaaatctacacaaaacagtaaagacagttatggctgttcaatacaagttccctgacaaagtttgcatatcatctgaagacagtaaaaatctgatatcccgcatttttgtggcaaatccagcaatgagaatcaccctaaaggaaatcaagtcacatcaatggttttaa

SEQ ID NO: 622 - DNA, 518 bp, Glycine max
atgtatttgtctttttctaaaatatccttaaaaaacacactccttttgttcactccccgcaagtttctttccgtgaaatccctattgagagcgcaacaacaacacacaccatcaacaaggacgaagacttgcttcaagttggtaggagaattgccatttgtggacaaagaggatacccaaaatctacacaaaacagtaaagacagttatggctgttcaatacaagttccctgacaaagtttgcatatcatctgaagacagtaaaaatctgatatcccgcatttttgtggcaaatccagcaatgagaatcaccctaaaggaaatcaagtcacatcaatggttttaaaagaacttgcctaaggaattgagagaaggggctcaagatgtttactacagtgaggaaaatacaaaatatccatgaggaaaataatcgttgtcttttaggaaaaagattttggggagtatgaaaaaataaaaaataaaaaaagaggaaagaagtgatagttgtaatagatgata

SEQ ID NO: 623 - DNA, 4358 bp, Glycine max
attttcaagggtagagggtagctggagcaaattggggtgccaatagaaatttctttaactttgggaggcccacgaggccaagatagaaatgaaccaatttgaaggaaacaaacaaattaaagctgtaaaaataaaaaatatccaattattaccccgtgttcttttagaaattgaatggaatcatgtgtactgcactataaatgaccaccaaataaatggtttatttaacaaagtggaatccatgtcttcaaacaagtagcacgaaggacatcaaaaccatagttcaccgaaggacgctagtttaaatttcatccttttagtgaacttcaatgtaattaaataaatcaaaggatgggatatacatgttgtttgaagactcattggacggtaacgcaaaataaagtaacattatagtcaaatccaaaatgttaattttattagagtcgaccatcacggcacgagaagtcatcagagtggttgagttatttgttcaagttgacaatttaacaattctcgaagataaaatgaaacttcgaggaagatgataatgtcagtttcgtgtgctgagttatttaagaaataaaaacttctatttatttatttatttatcatacgaaatcttgtcttgaaacttgtgtatatgtaagatggtgtttggcttcaattttatattgtgagctaattcaattgagcatagtgggaatacaatgtcctcctcttcctttagctatggatggaaatatgatgtgttcctcagcttcagaggctctgatactcgccatggttttactggtcatctctacaaagctctgtgtgatagaggaatccacaccttcattgatgatgaagagcttcaaagaggagaagagatcacaccattacttgtcaaggcaattgaagggtccaggattgccatccctgtgttctctaagaactatgcttcttccactttttgcttagatgaacttgtccacatccttgcctgtgttaaggaaaagggtacactggttttaccagttttttatgaggttgatccctctgatgtacgacatcaaagaggtagctacaaagatgcactgaatagccataaggagaggttcaatgatgaccaagagaaattgcagaaatggaggaattctctgagtcaagcagctaacttggctggttatcatttcaaacatgggattgaaaatgaatatgaatatgactttattggcaacattgttaaagaggtctcccaaaaaattaatcgcactgttttgcatgttgcggattacaccgttggactggagtttcgaatgaaagaagtaaactcgcttttgaatttcaaatctggtggagtacacatggtagggatccacggagttggcggagtaggcaaaacaacacttgctcgagcaatttacaatttgattgctgatcaatttgaagtattgtgttttcttgataatgtgagagaaaactcaattaaaaatggattggtgcatctccaagagacacttctttctaaaacaattggagagaagggtattaagttaggaagtatcaacgaagcaattccaataataaagcataggctccaccgaaagaaggttcttttggttctggatgatgttgacaaaccagatcagttgcatgcaattgctggagggatggattggtttggttctggtagcagagtcatcattaccactcgaaacagacatttactaacatgccatggggttgaaagcatatacgaggttcatgggttaaatcataaagaagctcttgaattgcttagttggagtgcttttaaaactggcaaagttgatccatgctatgtgaacattttaaaccgtgcagtaacttatgcttctggccttccattggctttgaaagtaattggctccaacttgattggaaaaaggatagaagaatgggaatctgccttagatcagtatcaaagaattcctaataaagatattcaagacatacttaaagtaagttttgattctttagaggaatatgaacagaatatttttcttgatattgcctgttgcttcaaaggatatcgtttgtcagaagttaaagaaatactttttagtcatcacggtttctgcccacaatatggtataggagtgttgatcgacaaatctctcataaagattgattgctttggtaacgtgacattgcatgacttgattgaagacatgggtaaagaaattgtccgaagggaatcaccagaagagcctgaaaatcgcagtaggttatggtgtcctgaagatatagttcaagtcttagaagaaaataagggtactagtagaattcaaatgatagctctggattatctcaattatgaagaagtagaatgggatggaatggccttcaaggagatgaataacctcaaaacacttatcattagaggtggttgctttaccacaggtcccaaacatcttccaaatagtttaagagtattagaatggcggcgatatccttcaccatctctaccatttgattttaatccgaagaaacttgtctcactacagttacctgatagttgcttaacgtctctcaattggctcaactcaaagaataggttcttgaatatgagagttttgaattttaatcagtgtcattatataacagagatacctgacgtatgtggtgccccaaatttacaagaattatcatttgaatattgtgagaatttaattaaaattcatgtatcggttggattcctggataaacttaaaatcttggatgctgatggctgcagcaagcttacaagttttccaccaatgaaattgacctctcttgaagaacttaaactttcattttgtgctaatcttgagtgttttccagaaatattagggaagatggaaaatgtcacttcccttgatattaaagacactcccataaaagaactgccatcttcaattcaacatctcagtcgacttcaaagaattaaactgaagaatggtggagttattcagttaccaagtaccttttttgcaatgaaagaacttcgttatttgcttgttaaccaatgtgaggggttgctactacctgtagagaacgaagggaaagaacagatgagctcaatggtggttgaaaataccattggttatcttgatctttcacattgccacatatcagacaaattccttcaaagtggtctccctttgttttccaatgtgaaagaactatacctaaatgggaatgatttcacaattcttcctgcctgcattcaagaatttcagtttctgacagaactttatttggaagcttgtgagaatcttcatgaaattggatggattccaccgaatttagaaatattcgctgtaatagattgcacatccttgaaagaattagacctcacacttcttcccacatggaacaaagaatgttgccttttaaggaagcttcttttatgtggatgccggaatcttgaaaaacttaaagggattccactgaacatagaagaattgattgtagaatcctgcaattccttgaaagatctagatcttactcttcctccttcatgcacccgacaatgtcgtattttgagtaaacttatattggatagttgtatggattttgaagaaataaaagggattccatccgacattggagtattttctgcaagagaatgctcatccttgacttctgagtgtagaagcatgttacttaacgaggaattacatgaagccgatgggttcaaagagtttattttgccaggaactagaattcccgagtggttcgagtgtaccaatgaatcatcaatttgtttctggtttcgtgacaagttccctgcgatatctgtctgtgtagtttctgaaccaatggattcagatgtaacgttcagctttatcatcaatggtgtggaacatttaccaaagggtgctatctctttggacctatgcgttgatcatctgtggattattgatcacatagaggaactattcaatgactgtgttctttcggaaaatgaatggaatcatgtggtgtgtactacatcatgggtaccccaaccaatcaaacaaattggaatccatgtaatcaaacaaggaagcaacttggaggatatccaatttaccaatccactattgtccaaagaagacccagattttcgcatacaacatgatgattcaaggaaacgaaaaagacaagagtgactgtcttctcccggagatgaagtatcttcccgttgattgataataaaattttgtggttttaggacaccttgttttgattatatattgtgcaatgttatgtattcccaatataattacaggaggtgctatggaagattaacatgtaattttttgattgaaaccacgtaacatatctacattttattcattgagactaatata

SEQ ID NO: 624 - DNA, 819 bp, Glycine max
atgtcctccacttcctttagcaatggatggaaatatgatgttttcctcaacttcagaggctctgatactcgctatggttttactggtcatctctacaaagctctgtgtgatagaaaagtccgcaccttcattgatgatgaggagcttcaaagaggagaacagatcacaccatcactcttgaaggcaattgaagagtccaggattttcatcccagtgttctccaagaactatgcctcttccactttttgcttagatgaacttgtccacatctttgcctgtgttaaggaaaagagtagattagttttgccggttttttatgaggttgatccttctcatgtacgacatcaaagaggtagctacaaagaagcactgaatagccataagaagaggttcaatgatgaccaagagaaattgcagaaatggaggaatgctctgagtcaagcagctaacttgtcgggctatcatttcaaacaggggaaggaagaatatgaatatgactttattgctaagatcgttaaagaggtttctcaaaaaattaatcgcactcttttgcatgttgcggatttccccgttggactggagtatcgtatgcaagacgtaaactcacttgtgaatattgaatctggtggagtccacatgataggaatccatggagtcggcggagtaggcaaatcaacacttgctcgagcaatttataatttgattgccgatcaatttgaagggtattgttttcttaatgtgagagaatactcaatgcaaaatggattggtgcatctccaaaagaaacttctttctaaaacaattggagagaagtgttag

SEQ ID NO: 625 - DNA, 2559 bp, Glycine max
gttgatttattgaaagaaagaaacatcgaggaaggcgaagaagtgagttcggtgtgttatttatttattttacgcagtttgggcttggcttacatgaacaaatgtcatatttaatgtatcattgtcgggtggacttgacttcagtgaggaatcaacttttctaacgcgtttagtccattactgatgtttttcccacttctttatcaaccatctactcttgttctctttcccaactactctcagacatcagtttggtactttactcattgttgttcatttatcactgagcttccttccttgttctctcgctaaccactctctcatcaatcaaaggtactcattgtgggaatacaatgtcctccacttcctttagcaatggatggaaatatgatgttttcctcaacttcagaggctctgatactcgctatggttttactggtcatctctacaaagctctgtgtgatagaaaagtccgcaccttcattgatgatgaggagcttcaaagaggagaacagatcacaccatcactcttgaaggcaattgaagagtccaggattttcatcccagtgttctccaagaactatgcctcttccactttttgcttagatgaacttgtccacatctttgcctgtgttaaggaaaagagtagattagttttgccggttttttatgaggttgatccttctcatgtacgacatcaaagaggtagctacaaagaagcactgaatagccataagaagaggttcaatgatgaccaagagaaattgcagaaatggaggaatgctctgagtcaagcagctaacttgtcgggctatcatttcaaacaggggaaggaagaatatgaatatgactttattgctaagatcgttaaagaggtttctcaaaaaattaatcgcactcttttgcatgttgcggatttccccgttggactggagtatcgtatgcaagacgtaaactcacttgtgaatattgaatctggtggagtccacatgataggaatccatggagtcggcggagtaggcaaatcaacacttgctcgagcaatttataatttgattgccgatcaatttgaagggtattgttttcttaatgtgagagaatactcaatgcaaaatggattggtgcatctccaaaagaaacttctttctaaaacaattggagagaagtgttagaattaatgtctcatgtgagaagcatatgacttagtagggactaataaataaataattaacaattaatggctaaattgtaattgggcttaataggagaagtttctaggttaactgctacttgatgggagtagtggttataaaaggggcttaatacccactaatgtgaaataaggtccccttcctgaccagaaagtgctcttttctcacccatagccatcaggaacggagagagacagaaaagaaaggttaaaggaagcgaaatcctatttctctcattttcaaggaaatcaaagtgcaccagagagaagttcctatggagaaagtacctgttcccaactcactgaattctcatgtatcatctgtaccaatttttaatgggcttaacttctctgattggaatgagcaagttcaatttcatctcggtgttttggatcttgaccttgctatattggaagagaagcctgctactattactgatgctagtagcaatgaacagaaagctcattataaagcttgggaaagatctaacagactcaacctaatgttcatgagaatgactgttgcagacagtattaagacaactcttcctaaaaccgatagtgctaaagagtttatggggttagtgggagagcgctctcaaacagctgataagtctcttgctgggacattaatgagtacactaaccaccatgaagtttgatggttcacgtactatgcatgaacatgtcattgagatgacaaacattgcagcaagacttaaaaccttgggaatggctgtgaatgagaacttccttgttcagtttattctaaactcattaccgtctgagtatgacccgtttcaaatgagctataataccatgaaagataaatggaatgtgcatgaattgcacagtatgttagttcaggaagaaacgaggcttaagaatcaaggaagtcactcaatccattatgtaagccaccgagggaatcaaggagctggaaaaaaatttgtaaagaaacatgataaaggcaaaggaccattaaagatcaaggacggtcctgtggaaatccagaagaaagcatcaaagaacaataattgtcatttttgtggaaaatctggacatttccagaaagattgcccaaagcgtaagtcttggttcgaaaagaaagggattccttacaatccagaccataagcccaaatgagaagtttgttttcatggggaatagagtgaaagctccagtggaagcggtcgggacttatcgtttaaaactcgacactggacatcatttagatttactggaaactctttatgtacctagtttatctaggaatttggtttcattatctaaacttgatattactggatactcttttaattttggtaatggatgtttcagtttatttaa

SEQ ID NO: 626 - DNA, 2088 bp, Glycine max
atgaaagaattccagataaaaagattcaagacatacttaaattacttgacaatgcatgacttgatagaggacatgggtaaagaaattgtaagacaggaatctccaggagagccaggcaaacgcagtaggttatggttgcatgaagatatagttcaagtcttagaagaaaatgagggaactagtagaattcaaatgataattctggattgcctcaaatatgaagtagtacaatgggatggaatggcctccaaggagatgaataacctcaaaacactcattgttaaaggtggttgcttttccaatggtcccaaacatcttccaaatagtttaagagtactagactggtggggatatccttcacgatcttttccaagtgattttcaaccgaagaaacttgtcagattacagttaccttatagtcacttaatgtgtctcaatttgttgtcttcgaacaagatgttcgtgaatatgagtgttttgaattttaatgactctccatatataacagagatacctaacttatgttgtgtcccaaatttacaaaaattatcatgtcgctattgtgataatttgattaaaatacacaaatcggttggattcctggataaacttgaagtcttagatgctgataaatgcagcaaacttagcagatttccacctctcttgaaattgacctctcttaaagaactcgggctttcatgttgtcctagtcttgagatatttccaaaaatattaggaaagatggaaaatgtaacttccctttatatttcatacacgcccataaaagaactgccattttccattcaaaatctcactcgacttcaaagacttgaactagtggcttgtggaattgttcagcttccaagtagcatctatgcgatgcaggaacttcgccatttgattgtgaaggcatgcaaggggttgcttttacccaaagaggataaaggtgaggtacaaacgaactcattggtctttaaaaacaccattgttcttgatctttcaaagtgcaatatatcagacaaaagccttcaaagaggtctccatttgtttgccaatatgagagaattatacctatcatataatgatttcacaattcttcctgcaagcattaaagaatgtcacgttttgacaaaaatttatttgaaaggttgtgagaatcttcaggaaattagaggggttccacctaacttagaaggattctctgtaatagagtgctcattgttgaaagatttagacctcacacttcttcctacagagaacaaaaaacggttctttttgaggatgctttatgtaactggatgcaagaatcttaaaaaaattgaagggattccacagaggatagaagtgctcagagtaacattttgctcatccttgaaaattgtagaatttactcttcatcctgcaggcacccaaggttttcaccttcggagggaaattgttctggataactgtgagaatcttcaagaaataaaagggattccatttggcattcaatatttttcggcaagggattgtcattcattgtcttccgagtgcagaagcatgttactgagtcaggaattgcatgagactagggaatgtggagtgttttatttggcaggaacaaggattccagaatggtttcatcattgtatcaatggatcgtcaatttctttctggtttcgtaacaatttcccttcaatatctctgggtgttgttgctggacccaagagttatttaaatgtgcattccagatttaggatcaatatcaataacaatataacatttaatttaggaataaggaatcatttggttcaagtacgtcatcatcgggtggagctagcctcgatacctatagttttttggggaaataaatggaatcgtgtggaatgtactgtatacccacttcaagagttcatcaaacaaattggaatccatgttttggaacaaggaaacaacatggaggacatccaatttaccaatccgctgtcgtcctcaggggaaatgaacaaaaagaggaaaaagaggggaaccaggcgtcctgctcctccccaagtactggagggcccattgtccagattgatttttaaagtaaactcagttttatga

SEQ ID NO: 627 - DNA, 3990 bp, Glycine max
agtgctcagcatctcccgttccaattcagaaacgagacaaatttagtctcgcacaatgtcctaaaaatgatctggaacggaagcaaatggaagaaatttcgtatgcatcagttgttgggagtattatgtatgctcagacctgcactcgaccagatataagctttgcaaccggaatgttaggaagatatcaaagtaatccaggaatggaacattggaaagctgcaaagaaagttctgagatacttacagggaacaaaagaccacatgcttacatataagaggtctgatcacctagaggtgattggatattcagactcagactttgctggatgtgtggatacaagaaaatccactcttggctttgtatttctcttagccggaggagcaatatcatggaagagtgcaaaacaatcagttgttgctgcatccaccatggaagctgaatttgtagcatgttttgaggctacaattcaggctaattggctgcggaactttatttcagggcttggaattgtcgacagtattgctaggccgctgaaaatgtattgtgataactccgcagcagtattcttttctaagaacgacaagtactctacggttgctaagcatatggaattgaagtactttgtcgtgaaagaagaagttcagaaacaaagagtgtcaatagaacatattagcacaaagcttatgatagctgaccctttgacaaagggattaccgcccaagacatttatagaacatgttgaaagtatgtgcattattgttattgatgatcattaagtgtaatttaccttatgtaattttgctgacactctgagctcaattatgatatgtttctgattacctgttctctatgtttgcatgcatgtttgtgataaagtaatgttaacaggttttgtcttgaatgaagaaattatgttggaccaattatgtactcctaactaatggtcatattaaggagaagactaatttgtagtacatggaagggactatgtcgattagatgatgtacaaccgccatgactcgaattggttcctattcttaatcatgaaattatgatgtacccaatgtgtaaaacaatttagtcaatttttaatgcgcattatgttagttaatctatttatttatttagtccataatgtttattgatgtcacatgagccaagtgggagaatgtttgaattaatgtcttatgtgagaagcatatgacttagtagggactaataaataaataattaacaattaagggctaaattataattgggcttaataggagaagtttctaggttaactactacttgatgggagtagtggttataaaaggggcttaatatccactaatgtgaaataaggtccccttcctgaccagaaagtgctcttttctcacccatagccatcaggaacggagagagacagaaaagaaaggccaaaggaagcgaaatcctatttctctcattttcaaggaaatcaaagtgcacaagagagaagttcctatggagaaagatcagttgcgggcaattgctggagggacagactggtttggttctggtagcaggatcatcattaccacccgagacaggcatttactaacttgccatggggttaaaaataaatatgagtaataggttccaacttgtctggaaaaaggaaagaagtatgggaatctgccctagatcagtatgaaagaattccagataaaaagattcaagacatacttaaattacttgacaatgcatgacttgatagaggacatgggtaaagaaattgtaagacaggaatctccaggagagccaggcaaacgcagtaggttatggttgcatgaagatatagttcaagtcttagaagaaaatgagggaactagtagaattcaaatgataattctggattgcctcaaatatgaagtagtacaatgggatggaatggcctccaaggagatgaataacctcaaaacactcattgttaaaggtggttgcttttccaatggtcccaaacatcttccaaatagtttaagagtactagactggtggggatatccttcacgatcttttccaagtgattttcaaccgaagaaacttgtcagattacagttaccttatagtcacttaatgtgtctcaatttgttgtcttcgaacaagatgttcgtgaatatgagtgttttgaattttaatgactctccatatataacagagatacctaacttatgttgtgtcccaaatttacaaaaattatcatgtcgctattgtgataatttgattaaaatacacaaatcggttggattcctggataaacttgaagtcttagatgctgataaatgcagcaaacttagcagatttccacctctcttgaaattgacctctcttaaagaactcgggctttcatgttgtcctagtcttgagatatttccaaaaatattaggaaagatggaaaatgtaacttccctttatatttcatacacgcccataaaagaactgccattttccattcaaaatctcactcgacttcaaagacttgaactagtggcttgtggaattgttcagcttccaagtagcatctatgcgatgcaggaacttcgccatttgattgtgaaggcatgcaaggggttgcttttacccaaagaggataaaggtgaggtacaaacgaactcattggtctttaaaaacaccattgttcttgatctttcaaagtgcaatatatcagacaaaagccttcaaagaggtctccatttgtttgccaatatgagagaattatacctatcatataatgatttcacaattcttcctgcaagcattaaagaatgtcacgttttgacaaaaatttatttgaaaggttgtgagaatcttcaggaaattagaggggttccacctaacttagaaggattctctgtaatagagtgctcattgttgaaagatttagacctcacacttcttcctacagagaacaaaaaacggttctttttgaggatgctttatgtaactggatgcaagaatcttaaaaaaattgaagggattccacagaggatagaagtgctcagagtaacattttgctcatccttgaaaattgtagaatttactcttcatcctgcaggcacccaaggttttcaccttcggagggaaattgttctggataactgtgagaatcttcaagaaataaaagggattccatttggcattcaatatttttcggcaagggattgtcattcattgtcttccgagtgcagaagcatgttactgagtcaggaattgcatgagactagggaatgtggagtgttttatttggcaggaacaaggattccagaatggtttcatcattgtatcaatggatcgtcaatttctttctggtttcgtaacaatttcccttcaatatctctgggtgttgttgctggacccaagagttatttaaatgtgcattccagatttaggatcaatatcaataacaatataacatttaatttaggaataaggaatcatttggttcaagtacgtcatcatcgggtggagctagcctcgatacctatagttttttggggaaataaatggaatcgtgtggaatgtactgtatacccacttcaagagttcatcaaacaaattggaatccatgttttggaacaaggaaacaacatggaggacatccaatttaccaatccgctgtcgtcctcaggggaaatgaacaaaaagaggaaaaagaggggaaccaggcgtcctgctcctccccaagtactggagggcccattgtccagattgatttttaaagtaaactcagttttatgacatgtatgattatataccttcaaaaatatatttatatgttaaaattttgcttgaaaattagttttgtagaagtaagtcttgggttgcttttgcaatctggattacagtagggagaactcaaaaagtatttttactttgaaagtttgaaaaatgatgatgagaaaattaagttgtatgttttttacgagtagtaactcatcttgagtggtaagaaagttaggaaga

SEQ ID NO: 628 - DNA, 511 bp, Glycine max
gatgtagattacttgggcaacccaagcctgatccatgcacaaagcatccttgccatctgggccactcaagttatcttgatgggtgctgttgagggttaccgtattgctggtgggcctctcggtgaagtgactgacccaatctacccaggtggcagctttgacccattgggccttgctgatgacccagaggcttttgctgagttgaaggtgaaagagctcaagaatggtaggttggccatgttctccatgtttggtttctttgttcaggccattgtgacaggaaagggacctttggaaaatcttgctgatcacctagctgacccagtaaacaataatgcctgggcctatgctacaaactttgtccccggaaagtgagcatagcaatagtgaaacaaagagaaacacagtgacttgaaaattagagtgagagtttcattgttatttggagaaatacatattgaatgttttcttttaagaagaatatgaattatatatcttattgtgcattgag

SEQ ID NO: 629 - DNA, 2010 bp, Glycine max
tgtgcagataggttagttaactatagttctaagaatcatactacttttgtttgctggaactcagttcctagatttttaaaggatgatttcttccgaaatagaaatggtcttcctttctttaggttttgctaactcttgtttccatgggttttgatccagtccccccatgtggtttttcatccttgcttttttgttaaatttttggagtgcttccctctttgcactccataacttttacaaaaacaaatcttacagaaactgctctacttatttgactaattgcaaatagttcataacatatttagttggcaaagtaaaggacgtcataggtttagaacttgcattctaaacactaatgattcagagtactcactgccaagaggaagaagtgctactaggtctttgatgaaacaaaattagggggatttccttttcttggccaaatttgtggtaggcatgtatcctatgagcattatacccagttaggaaataactagatgagaatacaacttgagtggcattgaatttcatattaggtgctttgtccttgacaaatcttccaattgagacaagtaacataaagtgataagcaccacgtctgcggttccaatattgatacttgtaattgatagtctgactgtagtctatgtgcgactccgtatgtgatcattcctttaattctttgagagactcactcttcaatttaagtttgataaatggagtttaagatgtctgtttttcaaatggagaatcacattttttaatctattaacttagaatccgatggataagaaaactgctatgtagtcaaagaaattttcattaacctgtgtactggcaaaactccccaagttcaaataatgttttgcacttgttggaaactcatatcatactagttattttagtttatcttgttactactctggagtttttgctaggatcaacagtaacctttcgtgttcctccttcttttacccttcactacccattcagtggtcagtaatcttgagtatatatagttttggtttaggaatgagatctgttatatatgttagtcaagtgtgtaatgaactcaaatcactaattatgttcatttgtgcgcagtaccttgaattttaacttttacatgaggtaactacaaattttgatttgtggcttattttattggttctgtttattgctgaagagtgaaaagattggtaaaacaaaagtgtttgtcgagttggtcaaatgctagaactagacacttgtagaagtggggtcttaggaaagttcgcaagcattattcatgggaaagtttgttcctatttcttgatatgttgattgtctgctgtacagattcaagctgcatgcagaggtgtctctacttgtttccttgaagtattagtttagcttacaacttacaagttgtatttaggggaatacttaaatttgagaagtttcatgagtttttttatggtggttgcagagcaacttgcctggcaagtttatgagggattgcagtaggaggcttctagtctgatgatttagtgctattttcgcatgcatgtcgctcgccaacttacctctctcatttcaactccattcccgagccgacaaacaaagaagaagaagataaccccaagtgaagataaagaggcttcaccatggtcaggacttagagagtgttgagcatggcgctaccctactggaaggagcatgactcaatactcaattttggtgagcatttgtgtggtgaatttgggcacaggagacactttcggtgtgtgtgtgggggaacttaaaaggatatttttgggggagaaaatatgaaaaggaggtatatttgtaataagaagagatatatactttcggtgtgtgtgggggaacttaaaagggtatttttgggggagaaaatatgaaagggaggtatatttgtaataagaagaggtatatttgtaataagaagaggtatatttatcaaccgcaaaaagttttattggattgtatgggattttcagatgaatttga

SEQ ID NO: 630 - DNA, 2257 bp, Glycine max
ttcacgcgcatggtagaagctagagcatacagcacagagcatgggacataccatatatacatatattatagtttagtttgcactattttaatggtggctggctaccttaattccacatgctaaaattttgcacccctttattatataaccgtttcattctctatagcatctcaaagggtgtccaaagaaggaatcacacaagagaaattttgggtggatcttggtaatttaaatttggtccaaaaatagtaagaaaaaaaaaccatagttcatttaattttcatgtccttgctaacggtggcgcaccaaagggggtcaggtgagtttatccggttcacggaaagtcatggcggtggtggcgatgacgtcagtggtgacggtgaacatggttgtggacatgatgatggaagtggtgctggaggttcactagggttgaattttaaccaagtgatgcaacaaggtgaggtgacaatgcaaggtggttcattggtttcagggtataacaggggtgatccagagttgagagaaatagtttcagctttgacacacgtggtgtcttcagggtctggccagaggagcaccgaatggacccagcaaagtggttttcctatgatgtctgcttcttctctttcacgtttgtctgctttctcttcttcttctccttctccttcttctggagcctcttgggttggccacaaaagaggcagagaagaagaagagaatagtacttcacataacttgatgcaacaacaacaacaaagtgctccaagactcttcagaaacattggtgacttcatggtgccttctcaaggagactcatcatcagtgacagaagaagcccccacctccacaactacaactgtaaccgccgtcactgaaaacccaccaggaggtggggaaaggaggagaaagtacagaggagtgaggcagaggccatggggaaaatgggcagcagaaatccgtgatccacacaaagcagcaagagtttggctaggcacatttgacacagaagaagcagcagcaagagcctatgatgaagctgcattgaggttcagaggcaacagagcaaagcttaacttccctgaaaatgtaagagcagttccacccattcaaccttttcaagccaccactaggctaaccgtttctgattccaccacctctcaattccggccactctccgcggtggcgccacccttcattcagcagccacagattcagggctcctctgacttgatcagagactacttgcaatactctcagcttctacagagtgattttcaacagcaacaaatacaacaacaacagcagcagcagcggcagcagcagcagcggcagcggcagcagcggcagcagcagcagcaacaacaacaacaaccatctagtttgcttcagcagttgtactataatgcacaatttgcttcacttcaatcaccttcaatgctatcatcatctccttcattttcttcttctgtgtctccagcaccattcccattattcacaacctctgcttctttccccttgttttcaagtcaacaaatgggctatttccagccaccggaaagccgcaatcccgctggcggcgtgccggagtttccaacgtccacatggtcggataccagtagccagccaccaccttctggttgatacagtgttttagtttccttcatattttcctttttcttttttctttctttcattcttagcataaaaaaaaaagacttgttatacttatttcttttttcaagggtgaaactatgatatagttttttttaagtatttttggtactattctcgtatcagaattagagtttcagtaatttatgttgatattcaatacaaatctttattatgtaaattaaaatgtgaaactttaattctttcttttatatatatatatatatagtaccaaaaagatcttactaactttatttaagtttggtactttttaaatgatggtaaattccttgaacatgtagttttgttcctattcatgtaaagaagattatttgaaaacagaaaaggtgggagtgattgaagattgatgatggatgagaaagagtggcaggtaaagacaaagcagcatttaggatttagggttagtttatttccaattctcaatggatttgatgttaacattctctcagttatccatggaaagacgtagaaatccatagtttttacataccctctgtctgctatctgctatacagccattgattttatcaaaatgttcctatactttagttcttttttaata

SEQ ID NO: 631 - DNA, 1662 bp, Glycine max
atgtcattctcattgtcaagaaggttcagctcttttcttccaaaccccactttccctctttactttcactctcagcctccatccattgacaatgttgttgatgatgctatttcccagttcaatggcatgctccttatgcatcataccccgcccatagtcgaatttggcgagattttaggatatcttgcaaagatgaagcattattccactgccatttccctttctaaacaaatggaagtcaaaggaattgagccaaatcttgttactttgaacatccttatcaattgtttctgccacttgggccaaatgtccttttctttttctgtattgggcaaaattctaaaattaggttatcagccgaataccataaccttgactacactcatgaaaggtctgtgtctcaagggtgaggtccagaaatcagtgcactttcatgacaaggtcgtagcacaaggatttcagatgaaccaggttagttatgggaccctgctcaatggactatgtaagataggagaaacgagatgcgccatcaagtttctgcgaatgattgaagacagttcaactgggcttaatgtggtaatgtacaacaccatcattgatggtttatgcaaagataaacttgtaaatgaggcttatgatttttattctgaaatgaatgctagaggaatttttcctaatgttatcacttacactactctaataggtggtttttgccttgcgggtcagttaacgggagcattcagtttattaaatgaaatgatattgaagaacatcaacccgaatgtttatacctatgctatattgattgatgcattatgtaaagaaggaaaggtgaaagaagccaaaaatttattagctgtgatgacgaaagaaggagtaaaacctaatgttgttgcttataacactttaatgaatgggtattgtttagctggtgaagtgcagggagcaaaacagatgttccacgctgtgctccaaatgggagtaaatcctaatgtttgcagttacagtataataattaatggattatgtaagagtgaaagggtggatgaagccatgaatctcctaagagaaatgttacataaatatatggttcctgatgcagcgacatatagttctcttattgatggtttgtgtaaatcagggagaattactactgccttgagtcttatgaaggagatgcactacagaggtcaaccagctgatgtagtcacctacacttccttattagatggtttctgcaaaaatcaaaaccttgacaaggcaactgcactattcatgaaaatgaaggaatggggaattcagccaaacaagtacacatacacggcacttattgatggattatgtaaaggtggaagacttaaggatgcacaaaagctttttcaagatctcttggttaaaggctgttgtatagatgtctgcacatataacgtcatgatcggtgggctttgtaaagagggcatgcttgatgaagcattggccattaagtcaaaaatggaagacaatggttgcatccctaatgttgtaacttttgaaatcattattcgttctcttttcaagaaggatgagaatgacaaggccgagaaacttctccatgaaatgattgctaaaggcctattacgttttaggaattttcatggtgagcgatctctagatacaaattaa

SEQ ID NO: 632 - DNA, 795 bp, Glycine max
atggctgcttcaacaatggctctctcttcatcatcattggctggccaagctatcaagcttgccccctccacccctcagcttggtgttggaagggttagcatgaggaaaacagcctccaagactgtttcttctggaagcccatggtacggcccagaccgtgtcaagtacttgggcccattctctggtgagcccccatcctacctcactggtgaattcccaggtgactatggttgggacactgctgggctttctgctgacccagagacctttgccaagaaccgtgaacttgaagtcatccactccagatgggccatgttgggagccctgggctgtgttttccccgaactcttggcccgcaacggtgtcaagttcggtgaagccgtgtggttcaaggccgggtctcagatattcagtgagggtgggcttgactacttgggcaacccaagcctgatccatgcacaaagcattcttgccatctgggccacccaagttatcttgatgggtgccgttgagggttaccgtattgctggtgggcctcttggtgaggtgactgacccaatctatccaggtggcagctttgacccattgggccttgctgatgacccagaggcttttgctgagttgaaggtgaaagagctcaagaatggtaggttggccatgttctccatgtttggtttctttgttcaggcaattgtgacaggaaagggacctttggaaaatcttgctgaccacctagctgacccagtaaacaataatgcctgggcctatgctacaaactttgtccccggaaagtga

SEQ ID NO: 633 - DNA, 1281 bp, Glycine max
atgatgcatttttttaccattggctatacacaacttccctcaactttttgttcactaaagtcaattttcttctttgcttccacttgttcttcagcaaactcacacaaccacctgaaaactgaatcacaaccctctcttcttctcttactctctctttctctttggtatcatcattcatcaccacacaagagaaaaaaaaaagaagaaagaacaaataaaccttttttttttaagagaaagaaagaaagaaaaggaaaaataaagttttttttttttttttttagtttttcgatggacccgaagttcatcggaaagccgctggcgatggtggacctggaccgggaccggatgtcggagcgtgggtcccaccaccggcgttcccactccgacacctccttccgcttcgctgccaacttcgacgagcttctcctcttcgacccctccgacctcgacatctccggcctcccgtcgccgctccctctgccgtcgcagggcgccggcggcgtggttccgatgtccgtcgtctccgaggagtctggcggacggccgaggcggtccggggcttccgccggcgggcacctgcggagtctgtcggtggattctgacttcttcgatgggctcgggtccggcgtcggcggcgatgagagaggtgccgggaatggcggcggcgagcggcacagcaactcgatggaggggtcgtcgacgacgtcgtttgaggcggactcggcgacgatgatggatggcatgaagaaagctacggcccctgataaacttgctgagcttgctcttacggatcccaaaagagctaagaggatgcttgctaacaggcaatctgctgcaagatctaaggagaggaagattcgttacacaagtgagttggagaagaaggtgcagactcttcagactgaagcaactaacctttctgcacagcttaccatgcttcagagagacactacagatttgactgcacagaataaggagctcaaactgcgcttacaggcttttgagcaagaagcacagcttagagaagatctcaatgaggcattgaagaaagaactgcagcgccttagggtacaaagtgcttgctggggtgctatgactggtggtaacccttcttttggtgggatattcaaccagttggcttcccagttagccatgcaacagttgtctaattctgtgccccatcagcaccagacacaacaccagccacaggttggcatgcctcctcccccctctggacagaagcaccctaagttcatggacttcaatcagcagaagtag

SEQ ID NO: 634 - DNA, 1795 bp, Glycine max
accaatctacctatctatccaatagattccactaataccaaatctaattttccattaaactccaaaatgaatatggtgtcaagtctagtaagatacatagccaatgacattgccgtcacatatctctaatcccaacactaatgatgcatttttttaccattggctatacacaacttccctcaactttttgttcactaaagtcaattttcttctttgcttccacttgttcttcagcaaactcacacaaccacctgaaaactgaatcacaaccctctcttcttctcttactctctctttctctttggtatcatcattcatcaccacacaagagaaaaaaaaaagaagaaagaacaaataaaccttttttttttaagagaaagaaagaaagaaaaggaaaaataaagttttttttttttttttttagtttttcgatggacccgaagttcatcggaaagccgctggcgatggtggacctggaccgggaccggatgtcggagcgtgggtcccaccaccggcgttcccactccgacacctccttccgcttcgctgccaacttcgacgagcttctcctcttcgacccctccgacctcgacatctccggcctcccgtcgccgctccctctgccgtcgcagggcgccggcggcgtggttccgatgtccgtcgtctccgaggagtctggcggacggccgaggcggtccggggcttccgccggcgggcacctgcggagtctgtcggtggattctgacttcttcgatgggctcgggtccggcgtcggcggcgatgagagaggtgccgggaatggcggcggcgagcggcacagcaactcgatggaggggtcgtcgacgacgtcgtttgaggcggactcggcgacgatgatggatggcatgaagaaagctacggcccctgataaacttgctgagcttgctcttacggatcccaaaagagctaagaggatgcttgctaacaggcaatctgctgcaagatctaaggagaggaagattcgttacacaagtgagttggagaagaaggtgcagactcttcagactgaagcaactaacctttctgcacagcttaccatgcttcagagagacactacagatttgactgcacagaataaggagctcaaactgcgcttacaggcttttgagcaagaagcacagcttagagaagatctcaatgaggcattgaagaaagaactgcagcgccttagggtacaaagtgcttgctggggtgctatgactggtggtaacccttcttttggtgggatattcaaccagttggcttcccagttagccatgcaacagttgtctaattctgtgccccatcagcaccagacacaacaccagccacaggttggcatgcctcctcccccctctggacagaagcaccctaagttcatggacttcaatcagcagaagtagctaataatagttgtagcagtaaatgattgattacatgcaatattcatcacaagtaacatcctgtgcatatgaatgtataactaactggtgagacttgtgaaggatatattgtgcagttcagtgtctttagtcatgtgttgtttatctttagttctaggatatgtgtactttctgcagttctaggtgagaagcatagcctttgaaatgtaagcgtcatagctcttgggtgaatgagggtaacataaaggtgtagaaagactagttgataatagtatagatggtgaatgaagtttattaactagcttctggacttaaatagcatgctatatatgttaaaagttaaagcagaaagcatcttctcggtatgccttgct

SEQ ID NO: 635 - DNA, 3075 bp, Glycine max
atgtggtgtttccttctctgttcccatttgctcatcctttattttttaccctctcattccttatgccacccccatgacagctttgccttgctccacttcaaaaactccttcactattaatactagttatgaccattatgaatatccttattattatcataaatgtgatcatggctattcaaagacgagaacatgggaaaatgggacagattgttgctcttgggctggagtcacctgccaccccatctctggtcacgtcactgagctcgacctcagctgcagtggtcttgtcggcaaaatccatccaaacagtacgcttttccatctttctcatcttcactcactcgaccttgctttcaatgattttgatgaatctcatttgtcatctctctttggtgggtttgtgagcctcactcatctcaacttgtctgctacgtactctgaaggggatattccttcccaaatttctcacctttccaaattagtctcacttgatctctcatataatatgttaaagtggaaggaagacacttggaagagattgctccaaaatgcaacagttttaagggtgcttcttttggatgaaaatgatatgtcttccatttcaatcaggacactcaatatgtcttcctctttggttactcttagtttggtatggactcagctaagaggaaacttgacagatggcattctctgtttaccaaatcttcagcacttggatctttcaattaattggtacaatagctacaataggtacaataggtacaataggtacaataaaggtcagcttccagaagtgagttgtagaacaacttctcttgatttcttagatatttcaaattgtggtttccaagggtcaatccctccctctttctccaacctcatacatctcacttccctgtatctctcatctaacaacctcaagggttcaatccctccctctttctctaacctcacacatctcacttccctggacctctcatataacaacctcaacggttcaatcccatcctcactcttaacccttccacggctaaactttctgaatctacacaataaccaactcagtggtcaaatcccagatgtctttcctcagtcaaacagctttcacgaattggatttgagttataacaaaatagagggtgagctgccatcaacactttcaaatcttcaacatctcattcacttgcatctttcatataataaattggagggccctctgcctaacaatataacagggttttcaaacctaacatcgttatggttacatggaaacttactgaatgggacaattccttcttggtgtttatctttgccatctttggtggatttagatctatcaggaaaccaattctctgggcatattagtgcaatctcatcatattccttgaagagattgtttttatcccacaacaagttacaaggaaatattccagaatcaatttttagccttctaaaccttactgacttagatctatcatcaaacaatttaagtggatctgtcaaatttcatcatttctccaagcttcaaaatttgggagtactttacctttcacagaatgatcagttatcactaaatttcaaatccaatgtcaagtataatttctcccgtttatggagattggacttatcttctatggatttaactgaatttccaaaattatcgggaaaagtcccatttttggaatcactccatttgtccaataacaaacttaaaggtagattgccaaattggttgcatgaaacgaactcattgttatatgaattggacctctctcataacctattgacgcaatcattggaccaattctcgtggaaccaacaactcgcaatcattgatcttagttttaactcaatcactggtggcttctcttcctcaatttgcaatgcaagtgcaattgcgattctcaacttgtctcacaacatgttgacaggaaccattccacaatgccttactaactcatcattccttcgagtcttggatctacaactgaacaagcttcatggcactttgccaagtacctttgcaaaggactgctggctcagaactctggatctcaatggcaaccaattattagaaggctttttgccagaatctttgtccaattgcatttatctggaggttttagatcttggaaacaatcaaataaaggatgtgtttccccattggcttcaaactctaccatatttggaagtattggttttgagagccaacaagttgtacggtcccattgcgggatcaaagaccaagcacggattccccagtttagtcatttttgatgtctcttccaacaacttcagcggcccaattccaaaagcctacattaaaaaatttgaagccatgaagaacgttgttcaagatgcctatagccaatacatagaagtttctttaaatttttcttatggatccaactacgttgattctgtgactataacaacaaaagcaattactatgacaatggatagaattcgaaatgactttgtaagcattgatttatcgcaaaaccgatttgaaggagagattccaagtgtcattggggagcttcattctctcagaggactcaacctttcccataacagacttattggtcctattccccaatccatgggaaatttgagaaacttagaatcattggatctctcctcaaatatgctcactggtgggatacctacagaattaagcaatttgaactttcttgaagtcctaaatctttccaataaccatcttgtgggagaaatacctcaaggaaaacagttcggtactttttccaatgattcctatgagggaaacttggggttatgtggactcccattgacaacagaatgcagcaaggaccctgaacaacattctccaccttcaactaccttcaggagagaaccaggatttggatttgggtggaaaccagtggctataggatatggatgtggaatggtctttggagtgggaatgggatgttgtgtattgttaataggaaagcctcaatggcttgtgagaatggttggaggtcaactaaataaaaaggtgaaaaggaagacaaggatgagatctaatgaaaatggtagcagaatgaattag

SEQ ID NO: 636 - DNA, 1326 bp, Glycine max
atggaaggcatccctggcagccttggttggcctattgtgggagagagtttctcattcctctctgatttttcaaaaatcactttaagtatgtcttatgattttaatctctcaaatttatacggctgttgttttagtccctcaaataaaaatatatatggaaaggttttcaagagcttcgtccgggggaggttcactgtattcatgactgggagagaagcaagtaagattttgttaaccggaaaagatgggattgtgagtttgaatctgttttacactggccagcaagttctgggccccaccactttgctgcaaaccactggagaggcacacaaaaggctaagaaggctgatcggtgaacctttatcaattgatggactgaaaaaatatttccattttatcaatactcaggcaatggaaacattaggtcaatggcaaggaaggaaagtcctggttcttgaggaggcttctacatttactctaaaagtgattggacatatgatcatgagtttagagccttctggggaggaacaggaaaagtttaggtcaaattttaagattatctcttcctcatttgcctctttgccatttaaacttccagggacagcattccatcatggtatcaaggctcgggataggatgtatgagatgttggattctacaatttcgcggaggagaagtggccaagaatttcaacaggatttcttaggatccttagataatatattaactctgctggttgcgggccatgataccacaacagctgctcttacatggctcatcaaatttcttggtgaaaatccaattgaggaacacagacaaattgtcatcaacagaaagagtggaacagatcttacttgggctgaagttaataacatgccttacacggctaaagtgatcagtgaaacacttcgaagagccacaatactaccttggttttcaagaaaggcatcccaggattttgaaattgatggttataaaattaagaaaggttggtctgtcaacctaaatgttgtttctatacaccatgaccccgaagttttcccagatcctgaaaagtttgatccctctagatttgatgaaaccctgaggcctttcagttttcttggatttggtagtggaccacgcatgtgtcctggaatgaaccttgccaagctagaaatttgtgttttcatccatcatcttgtcaacagatacaattggagacctctggagaaagacaattctgtgcaaccaacgcttgtaaggatgccaaagaacaagtatcctattataaaactacaaacaaacaacagaagaaaagatagcacagaaaaatgttgtatatga

SEQ ID NO: 637 - DNA, 3024 bp, Glycine max
atggaatcatggatgtggtgtttccttctctgttcccatttgctcatcctttatttttcaccctctcattccttatgccacccccatgacacctctgccttgctccacttcaaaaactccttcactatttatgaagatccttattattcttattattgtgatcatggttattcaaagacgacaacatgggaaaatgggacagattgttgctcttgggctggagtcagctgcaaccccatctcaggtcacgtcactgagctcgacctcagctgcagtcgcctttacggcaatatccatccaaacagtacgcttttccatctttctcatcttcactcactcaaccttgctttcaatgattttaattattctcatttgtcatctctctttggtgggtttgtgagcctcactcatctcaacttgtctaattctcactttgaaggggatattccttcccaaatctctcacctttccaaattagtctcacttgatctctctggtaataatttgttaaagtggaaggaagacacttggaagagattgctccaaaatgcaacagttttaagggtgcttgttttggatcaaacagatatgtcttccatttcaatcaggacactcaatatgtcttcctctttggttactcttagtctaggactgacttggctaagaggaaacttgacagatggcattctctgtttaccaaatcttcagcacttggatctttcacttaatcgggcccttgaaggtaagcttccagaagtgagttgcagaacaacttctcttgatttcttagatctttcactttgtggtttccaagggtcaatccctccctctttctccaacctcatacatctcacttccctggacctctcaggtaacaacctcaacggttcaatccctccctctttctccaacctcatacatcttacttccttggatctctcatataacaacctcaacggttcaatcccatcctcactcttaacccttccatggctaaactttctgtatctaaactataaccaactcagtggtcaaatcccagatgcctttcctcagtcaaacagctttcacgaattgcatttgagtgataacaaaatagagggtgagctgccttcaacactttcaaatcttcaacatctcattcacttggatctttcacataataaattggagggccctctgcctaacaatataacagggttttcaaacctaacatcgttatggttatctggaaacttactgaatgggacaattccttcttggtgtttatctttgccatctttggtggatttagatctatcaggcaaccaactctctgggcatattagtgcaatctcatcatattccttggagacattgtttttatcccacaacaagttacaaggcaatattccagaatcaatttttagccttctaaaccttactcacttagatctatcatcaaacaatttaagtggatctgtcaaatttcatcgtttctccaagcttcaaaatttggaaaaacttcacctttcatggaatgatcagttatcactaaatttcgaatccaatgtcaattatagtttctctaatttaaagttgttgaacttatcttctatggttttaactgaatttccaaaattatcgggaaaagtcccaattttagaatcactctatttgtccaataacaaacttaaaggtagagtgccacattggttgcatgaagtatcgttatctgaattgaacctttctcataacctattgacgcaatcattggaccaattctcatggaaccaacaactcggttaccttgatcttagttttaactcaatcactggtgacttctcttcctcaatttgcaatgcaagtgcaattgagattctcaacttgtctcacaacaagttgacaggaaccattccacaatgccttgcaaactcatcatcccttctagttttggatctacaactgaacaagcttcatggcactttgccaagtatcttttcaaaggactgtcggctcagaactctggatctcaatggcaaccaactattagaaggtcttttgccagaatctttgtccaattgcattgatctggaggttttagatcttggaaacaatcaaataaaggatgtgtttccccattggcttcaaactctaccagaattgaaagtattggttttgcgagccaacaagttgtacggtcccattgtcggtttaaagatcaagcatggattcccccgtttagtcatctttgatgtctctttcaacaacttcagcggcccaataccaaaagcctacatacaaaaatttgaagcgatgaagaacgttgttatagataccgatctgcagtacatggaaatttctattggagctaaaaagatgtacagtgattctgtgactataacaacaaaagcaattactatgacaatggacaaaattccaaaaggctttgtcagcattgatttatcaaaaaacggatttgaaggagagattccaaatgccattggagagcttcatgccctcagagggctcaacctttcccataacagaattattggtcctattccccaatccatgggaaatttgacaaacttagaatcattggatctctcctcaaatatgctcactggtgggatacctacggaattaagcaatttgaacttccttgaagtcctaaatctttccaataaccatcttgcgggagaaatacctcgaggacaacagttcagtacttttaccaatgattcctatgagggaaactcagggttatgtggactcccactgacaatcaaatgcagcaaggaccctgaacaacattctccaacttcaactaccttgaggagagaaggaggatttggatttggttggaaaccagtggctataggatatggatgtggaatggtctttggagtgggaatgggatgttgtgtattgttaataggaaagcctcaatggcttgtgagaatggtcggaggtaaacccaataaaaaggtgaaaaggaagacaaggatgagatctaatgaaaatggtagcagaatgaattag

SEQ ID NO: 638 - DNA, 3387 bp, Glycine max
atggaatcatggatgtggtgtttccttctctgttcccatttgctcatcctttatttttcaccctctcattccttatgccacccccatgacacctctgccttgctccacttcaaaaactccttcactatttatgaagatccttattattcttattattgtgatcatggttattcaaagacgacaacatgggaaaatgggacagattgttgctcttgggctggagtcagctgcaaccccatctcaggtcacgtcactgagctcgacctcagctgcagtcgcctttacggcaatatccatccaaacagtacgcttttccatctttctcatcttcactcactcaaccttgctttcaatgattttaattattctcatttgtcatctctctttggtgggtttgtgagcctcactcatctcaacttgtctaattctcactttgaaggggatattccttcccaaatctctcacctttccaaattagtctcacttgatctctctggtaataatttgttaaagtggaaggaagacacttggaagagattgctccaaaatgcaacagttttaagggtgcttgttttggatcaaacagatatgtcttccatttcaatcaggacactcaatatgtcttcctctttggttactcttagtctaggactgacttggctaagaggaaacttgacagatggcattctctgtttaccaaatcttcagcacttggatctttcacttaatcgggcccttgaaggtaagcttccagaagtgagttgcagaacaacttctcttgatttcttagatctttcactttgtggtttccaagggtcaatccctccctctttctccaacctcatacatctcacttccctggacctctcaggtaacaacctcaacggttcaatccctccctctttctccaacctcatacatcttacttccttggatctctcatataacaacctcaacggttcaatcccatcctcactcttaacccttccatggctaaactttctgtatctaaactataaccaactcagtggtcaaatcccagatgcctttcctcagtcaaacagctttcacgaattgcatttgagtgataacaaaatagagggtgagctgccttcaacactttcaaatcttcaacatctcattcacttggatctttcacataataaattggagggccctctgcctaacaatataacagggttttcaaacctaacatcgttatggttatctggaaacttactgaatgggacaattccttcttggtgtttatctttgccatctttggtggatttagatctatcaggcaaccaactctctgggcatattagtgcaatctcatcatattccttggagacattgtttttatcccacaacaagttacaaggcaatattccagaatcaatttttagccttctaaaccttactcacttagatctatcatcaaacaatttaagtggatctgtcaaatttcatcgtttctccaagcttcaaaatttggaaaaacttcacctttcatggaatgatcagttatcactaaatttcgaatccaatgtcaattatagtttctctaatttaaagttgttgaacttatcttctatggttttaactgaatttccaaaattatcgggaaaagtcccaattttagaatcactctatttgtccaataacaaacttaaaggtagagtgccacattggttgcatgaagtatcgttatctgaattgaacctttctcataacctattgacgcaatcattggaccaattctcatggaaccaacaactcggttaccttgatcttagttttaactcaatcactggtgacttctcttcctcaatttgcaatgcaagtgcaattgagattctcaacttgtctcacaacaagttgacaggaaccattccacaatgccttgcaaactcatcatcccttctagttttggatctacaactgaacaagcttcatggcactttgccaagtatcttttcaaaggactgtcggctcagaactctggatctcaatggcaaccaactattagaaggtcttttgccagaatctttgtccaattgcattgatctggaggttttagatcttggaaacaatcaaataaaggatgtgtttccccattggcttcaaactctaccagaattgaaagtattggttttgcgagccaacaagttgtacggtcccattgtcggtttaaagatcaagcatggattcccccgtttagtcatctttgatgtctctttcaacaacttcagcggcccaataccaaaagcctacatacaaaaatttgaagcgatgaagaacgttgttatagataccgatctgcagtacatggaaatttctattggagctaaaaagatgtacagtgattctgtgactataacaacaaaagcaattactatgacaatggacaaaattccaaaaggctttgtcagcattgatttatcaaaaaacggatttgaaggagagattccaaatgccattggagagcttcatgccctcagagggctcaacctttcccataacagaattattggtcctattccccaatccatgggaaatttgacaaacttagaatcattggatctctcctcaaatatgctcactggtgggatacctacggaattaagcaatttgaacttccttgaagtcctaaatctttccaataaccatcttgcgggagaaatacctcgaggacaacagttcagtacttttaccaatgattcctatgagggaaactcagggttatgtggactcccactgacaatcaaatgcagcaaggaccctgaacaacattctccaacttcaactaccttgaggagagaaggaggatttggatttggttggaaaccagtggctataggatatggatgtggaatggtctttggagtgggaatgggatgttgtgtattgttaataggaaagcctcaatggcttgtgagaatggtcggaggtaaacccaataaaaaggtgaaaaggaagacaaggatgagatctaatgaaaatggtagcagaatgaattagttgatatatggcatgactggagaatgtcttgttacatacctgccatctttgaaaacaaaacttaagggcaagaactttatcacactgcattgcatgggagatctggttcaaagttttgctgtaatatgaatgtgttatactcttgcttttgtcgtataactgtggcattaattggttgtataataatagatgttgtatatttttaaaaatggtatgtattggccaatgctaaaatattttgtatcttaattcaaggagctgaattcacggttttagcttccattgtagtctatttaattaattttctaagtatttaaccaccgtgaaatggctttagaagctgaggttgaggtccaggtataa

SEQ ID NO: 639 - DNA, 3147 bp, Glycine max
atggaatcatggatgtggtgtttccttctctgttcccatttgctcatcctttatttttcaccctctcattccttatgccaccccatgacacctctgccttgctccacttcaaaaactccttcactatttatgaagatccttattattcttatttttgtgatcatggttattcaaagacgacaacatgggaaaatgggagagattgttgctcttgggctggagtcacctgccaccccatctcaggtcacgtcactcagctcgacctcagctgcaatggcctttacggcaatatccatccaaacaagcctcacgcatctcaacttgtcttcttctgactttgaaggggatattccttcccaaatctctcacctttccaaattagtctcgcttgatctctcatataatatattaaagtggaaggaagacacttggaagagattgctccaaaatgcaacagttttaagggtgattgttttggatggaaatgatatgtcttccatttcaatcaggacactcgatatgtcttcctctttggttactcttagtctaagacagactgggctaagaggaaacttgacagatggcattctctgtttaccaaatcttcaacacttggatctttcacttaattgggaccttaaaggtcagcttccagaagtgagttgtagaacaacttctcttgatttcttacatctttcatgttgtgatttccaagggtcaatccctccttctttctccaacctcatacatctcacttccctatatctctcacttaacaacctcaacggttcaatccctccctttttctctaactttacacatcttacttccttagatctctcagaaaacaacctcaacggttcaatccctccctctttctccaacctcatacatctcactttcctggacctctcacataacaacctcaacggttcaatccctccctctttctccaacctcatacatctcacttccctggacctttcaggtaacaacctcaacggttcaatccctccctttttctctaacttcacacatcttacttccttggatctctcagaaaacaacctcaacggttcaatccctccctctttctccaacctcatacatctcacttccctggccctttcacgtaacaacctcagtggtcaaatcccagatgtctttcctcagtcaaacagctttcacgaattggatttgagcgataacaaaatagagggtgagctgccttcaacactttcaaatcttcaacatctcattcacttggatctttcatataataaattggagggccctctgcctaacaatataacagggttttcaaacctaacattcttatggttatatgaaaacttactgaatgggacaattccttcttggtgtttatctttgccatctttggtgggtttagatctatcaggaaaccaattctcagggcatattagtgcaatctcatcatattccttggagagattgattttatcccacaacaagttacaaggcaatattccagaatcaatttttagccttctaaaccttactgacttagatctatcatcaaacaatttaagtggatctgtcaaatttcatcatttctccaagcttcaaaatttgaaagaacttcaactttcacagaatgatcagttatcactaaatttcaaatcaaatgtcagttatagtttctccaatttattgagtttggacttatcttctatgggtttaactgaatttccaaaattatcgggaaaagtcccaatcttggaatcactctatttgtccaataacaaacttaaaggtagagtgccaaattggttccatgaaatatcgttatatgaattggacctctctcataacctattgacacaatcattggaccaattctcgtggaaccaacaactcggttaccttgatcttagttttaactcaatcactggtgacttctcttcctcaatttgcaatgcaagtgcaattgagattctcaacttgtctcacaacaagttgacaggaaccattccacaatgccttgctaactcatcatcccttcaagttttggatctacaactgaacaagcttcatggcactttgccaagtacctttgcaaaggactgttggctcagaactctggatctcaatggcaaccaattattagaaggttttttgccagaatctttgtccaattgcattaatctggaggttttagatcttggaaacaatcaaataaaggatgtgtttccccattggcttcaaattctaccagaattgaaagtattggttttgcgagccaacaagttgtacggtcccattgccggtttaaagaccaaacacggattccccagtttagtcatttttgatgtctcttccaacaacttcagcggcccaataccaaaagcctacattaaaacatttgaagcgatgaagaacgttgctctacatgcctatagccaatacatggaagtttctgtaaatgcttcttctggacccaactacactgattctgtgactataacaacaaaagcaattactatgacaatggacagaattcgaaatgactttgtaagcattgatttatcccaaaacagatttgaaggagagattccaagtgtcattggggaacttcattcactcagagggctaaacctttcccataacagacttattggtcctattccccaatccgtgggaaatttgagaaacttagaatcgttggatctctcctcaaatatgcttactggtgggatacctacagaattaatcaatttgaactttcttgaagtcctaaatctttccaataacaatcttgtgggagaaatacctcaaggaaaacagttcggtactttttccaatgattcctatgagggaaactcagggttatgtggactcccactgacaatcaaatgcagcaaggaccctgaacaacattctccaccttcaactaccttcaggagagaaggaggatttggatttggttggaaaccagtggctataggatatggatgtggaatggtctttggagttggaatgggatgttgtgtactgttaatgggaaagcctcaatggcttgtgagaatggttggaggtcaactaaataaaaaggtgaaaaggaagacaaggatgaaatctaatgaaaatggtagcataatgaattag

SEQ ID NO: 640 - DNA, 3440 bp, Glycine max
gtagaaaatggaatcatggatgtggtgtttccttctctgttcccatttgctcatcctttatttttcaccctctcattccttatgccaccccatgacacctctgccttgctccacttcaaaaactccttcactatttatgaagatccttattattcttatttttgtgatcatggttattcaaagacgacaacatgggaaaatgggagagattgttgctcttgggctggagtcacctgccaccccatctcaggtcacgtcactcagctcgacctcagctgcaatggcctttacggcaatatccatccaaacaagcctcacgcatctcaacttgtcttcttctgactttgaaggggatattccttcccaaatctctcacctttccaaattagtctcgcttgatctctcatataatatattaaagtggaaggaagacacttggaagagattgctccaaaatgcaacagttttaagggtgattgttttggatggaaatgatatgtcttccatttcaatcaggacactcgatatgtcttcctctttggttactcttagtctaagacagactgggctaagaggaaacttgacagatggcattctctgtttaccaaatcttcaacacttggatctttcacttaattgggaccttaaaggtcagcttccagaagtgagttgtagaacaacttctcttgatttcttacatctttcatgttgtgatttccaagggtcaatccctccttctttctccaacctcatacatctcacttccctatatctctcacttaacaacctcaacggttcaatccctccctttttctctaactttacacatcttacttccttagatctctcagaaaacaacctcaacggttcaatccctccctctttctccaacctcatacatctcactttcctggacctctcacataacaacctcaacggttcaatccctccctctttctccaacctcatacatctcacttccctggacctttcaggtaacaacctcaacggttcaatccctccctttttctctaacttcacacatcttacttccttggatctctcagaaaacaacctcaacggttcaatccctccctctttctccaacctcatacatctcacttccctggccctttcacgtaacaacctcagtggtcaaatcccagatgtctttcctcagtcaaacagctttcacgaattggatttgagcgataacaaaatagagggtgagctgccttcaacactttcaaatcttcaacatctcattcacttggatctttcatataataaattggagggccctctgcctaacaatataacagggttttcaaacctaacattcttatggttatatgaaaacttactgaatgggacaattccttcttggtgtttatctttgccatctttggtgggtttagatctatcaggaaaccaattctcagggcatattagtgcaatctcatcatattccttggagagattgattttatcccacaacaagttacaaggcaatattccagaatcaatttttagccttctaaaccttactgacttagatctatcatcaaacaatttaagtggatctgtcaaatttcatcatttctccaagcttcaaaatttgaaagaacttcaactttcacagaatgatcagttatcactaaatttcaaatcaaatgtcagttatagtttctccaatttattgagtttggacttatcttctatgggtttaactgaatttccaaaattatcgggaaaagtcccaatcttggaatcactctatttgtccaataacaaacttaaaggtagagtgccaaattggttccatgaaatatcgttatatgaattggacctctctcataacctattgacacaatcattggaccaattctcgtggaaccaacaactcggttaccttgatcttagttttaactcaatcactggtgacttctcttcctcaatttgcaatgcaagtgcaattgagattctcaacttgtctcacaacaagttgacaggaaccattccacaatgccttgctaactcatcatcccttcaagttttggatctacaactgaacaagcttcatggcactttgccaagtacctttgcaaaggactgttggctcagaactctggatctcaatggcaaccaattattagaaggttttttgccagaatctttgtccaattgcattaatctggaggttttagatcttggaaacaatcaaataaaggatgtgtttccccattggcttcaaattctaccagaattgaaagtattggttttgcgagccaacaagttgtacggtcccattgccggtttaaagaccaaacacggattccccagtttagtcatttttgatgtctcttccaacaacttcagcggcccaataccaaaagcctacattaaaacatttgaagcgatgaagaacgttgctctacatgcctatagccaatacatggaagtttctgtaaatgcttcttctggacccaactacactgattctgtgactataacaacaaaagcaattactatgacaatggacagaattcgaaatgactttgtaagcattgatttatcccaaaacagatttgaaggagagattccaagtgtcattggggaacttcattcactcagagggctaaacctttcccataacagacttattggtcctattccccaatccgtgggaaatttgagaaacttagaatcgttggatctctcctcaaatatgcttactggtgggatacctacagaattaatcaatttgaactttcttgaagtcctaaatctttccaataacaatcttgtgggagaaatacctcaaggaaaacagttcggtactttttccaatgattcctatgagggaaactcagggttatgtggactcccactgacaatcaaatgcagcaaggaccctgaacaacattctccaccttcaactaccttcaggagagaaggaggatttggatttggttggaaaccagtggctataggatatggatgtggaatggtctttggagttggaatgggatgttgtgtactgttaatgggaaagcctcaatggcttgtgagaatggttggaggtcaactaaataaaaaggtgaaaaggaagacaaggatgaaatctaatgaaaatggtagcataatgaattagatgatatgtggcatgactgtagaatgtcttcttgcacaccttcctgttgaaattcaattctgccttgttgaaaataaaacataagggccaaaaccttatcacactgcattgcatatgcatgggagatctgtttcaaagtttagttgtaattgtaatatgatgtgttgtacttttttttttctctgttggatagatgagtgtgatgtacttttttccccttcctttgctactgaaactcgggtctaaatcatcataagtttgatgttcttcattttccttgagcggg

SEQ ID NO: 641 - DNA, 2247 bp, Glycine max
ttcaaaaactccttcactattaatactagttatgaccattatgaatatccttattattatcataaatgtgatactggttattcaaaaacgacaacatgggaaattggaggagattgttgctcttgggctggagtcacctgccaccccatctcaggccacgtcactcagctcgacctcagctgcagtggccttgtcggtaatattcattcaaacagtacgcttttccatctttctcatcttcactcactcaaccttgctttcaatcattttaatcattctcatttgtcatctctctttggtgggtttgtgagcctcactcatctcaacttgtcttcttctgactttgaaggggatattccttcccaaatctctcacctttccaaattagtctcacttgatctctcatataatatgttaaagtggaaggaagacacttggaagagattgctccaaaatgcaacagttttaagggtgcttcttttggacgaaacagatatgtcttccacttcaatcaggacactcaatatgtcttcctctttggttactcttagtttgagatggacttggctaagaggaaagttgaccgatggcattctctgtttaccaaatctacagcacctagatcttgcatataattgggacattcaaggccagcttccaaaagtgagttgcagcacagcttctcttggtttcttagatctttcaggttgtggtttgcaagggtcaatccctccctctttctccaacctcacacttctcacttccctggacctctcaagtaaccacctcaacggttcaatcccatcctcactcttaatccttccacggctaacctttctgaatctaaacaataaccaactcagtggtcaaatcccagatgtctttcatcagtcaaacaactttcacgaattggatttgagtaataacaaaatagaggctgagctgccatcaacgctttcaaatcttcaacatctcattctcttggatctttcacataataaatttattggtcaaatcccagatgtgtttgccaggctaaacaaattgaatactctctatcttgggggaaacaattttggaggacaaatcccatcttcattgtttggcttaactcaactttctgagttggattgttctaataataaattggagggccctctgcctaacaatatcacagggttttcaagcttaacatggttaaggttatatggcaacttactgaatgggacaattccatcttggtgtttatctttgccatctttgacgactttagatctatcgggaaaccagttcacagggctgccagtgcatctaagtacaatctcatcatattccttggggattctatatttgtcctacaataagctgcagggaaacattccagaatcaattttcagccttgtaaaccttactctcttagatctatcatcaaataatttcagtgggtctgtccactttcgacttttctccaagcttcaaattttggaaaaccttgacctttcacagaatgatcaattatcactaaatttcaaatccaatgtcaattatagtttctccagcttaaggagtttggacttatcttctatggatttaactgaatttccgaaattatctggaaaagtcccaaatttaatgtttatctatttgtccaacaacaaacttaaaggtagagtgccaaattggttgaatgaaacgaggtcgtggttacatgaattggacctctctcataacctattgacacaatcatgggaccaattctcatggaaccaacgactcaattaccttgatcttagttttaactcaatcactgttttggatctacaactgaacaagcttcatggcactttaccaagcacctttccaaaggactgtgggctcagaactctggatctcaatggcaaccaattattagaaggctttttgccagaatctttgtccaattgcattgatctggaggttttagatcttggaaacaatcaaataaaggatgtgtttccccattggcttcaaactctacaatatttggaagtattggttttgagagccaacaagttgtacggtcccattgcctgtttaaagaccaaacacggattccccagtttagtcattttttatgtctcttccaacaacttcagcggcccaataccaaaagcctacattaaaaaatttgaagccatgaagaacgttgttctagatgcctatagccaatacatggaagtatatattcatttgggattaaaattataa

SEQ ID NO: 642 - DNA, 2247 bp, Glycine max; identical to SEQ ID NO: 641

SEQ ID NO: 643 - DNA, 1686 bp, Glycine max
atggaatcatggatgtggtgtttccttctctgttcccatttgctcatcctttatttttcaccctctcattccttatgccacccccatgacacctctgccttgctccacttcaaaaactcctccattattgatgaagatccttattattattcaaagacgagaacatgggaaaatgggacagattgttgctcttgggctggagtcacctgccaccccatctctggtcacgtcactgagctcgacctcagctgcagtggcattgtcggttatatcgatccaaacagaaaaatcccatttttggaatcactccatttgtccaacaacaaacttaaaggtagagtgccaaattggttgcatgaagcgagctcatggttatctgaattggacctctctcataaccaactgatgcaatcattggaccaattctcgtggaaccaacaactccgttaccttgatcttagttttaactcaatcactggtggcttctcttcctcaatttgcaatgcaagtgcaattcagattctcaacttgtctcacaacaagttgacaggaaccattccacaatgccttgctaactcatcatcgcttcaagttttggatctacaactcaacaagcttcatggcactttgccaagtacctttgcaaaggactgtcggctcagaactctggatctcaatggcaaccaattattagaaggttttttgccagaatctttgtccaattgcaatgatctggaggttttagatcttggaaacaatcaaataaaggatgtgtttccccattggcttcaaactctaccagaattgaaagtattggttttgagagccaacaagttgtacggtcccattgagggttcaaagaccaagcatggattccccagtttagtcatttttgatgtctcttccaacaacttcagcggcccgataccaaatgcctacataaaaaattttcaagccatgaagaaaattgttgttctagacaccgatcggcaatacatgaaagttccttcaaatgtttctgagtacgctgattctgtgactataacatcaaaagcaattactatgacaatggatagaattcgaaaggactttgtaagcattgatttatcgcaaaacagatttgaaggaaagattccaagtgtcattggggaacttcattcactcagagggctcaacctttcccataacagacttagaggtcctattcccaattccatgggaaatttaacaaatttagaatcattggatctctcctcaaatatgcttactggtcggatacctacaggattaaccaatttgaactttcttgaagtcctaaatctttccaataaccattttgtgggagaaatacctcaaggaaaacagtttagtactttttccaatgattcctatgagggaaacttagggttatgtggactcccattgacaacagaatgcagcaaggaccctaaacaacattctccagcttcactaacctttaggggagaacagggatttggatttggctggaagccagtggctataggatatggatgcggaatggtctttggagtgggaatgggatgttgtgtattgttaattggaaagcctcaatggattgtgagaatggttgggggtcaactcaataaaaaggtgaaaaggaagacaaggatgagatctaatgaaaatggtagcagaatgaattag

SEQ ID NO: 644 - DNA, 2010 bp, Glycine max
tagaataatatggaatcatggatgtggtgtttccttctctgttcccatttgctcatcctttatttttcaccctctcattccttatgccacccccatgacacctctgccttgctccacttcaaaaactcctccattattgatgaagatccttattattattcaaagacgagaacatgggaaaatgggacagattgttgctcttgggctggagtcacctgccaccccatctctggtcacgtcactgagctcgacctcagctgcagtggcattgtcggttatatcgatccaaacagaaaaatcccatttttggaatcactccatttgtccaacaacaaacttaaaggtagagtgccaaattggttgcatgaagcgagctcatggttatctgaattggacctctctcataaccaactgatgcaatcattggaccaattctcgtggaaccaacaactccgttaccttgatcttagttttaactcaatcactggtggcttctcttcctcaatttgcaatgcaagtgcaattcagattctcaacttgtctcacaacaagttgacaggaaccattccacaatgccttgctaactcatcatcgcttcaagttttggatctacaactcaacaagcttcatggcactttgccaagtacctttgcaaaggactgtcggctcagaactctggatctcaatggcaaccaattattagaaggttttttgccagaatctttgtccaattgcaatgatctggaggttttagatcttggaaacaatcaaataaaggatgtgtttccccattggcttcaaactctaccagaattgaaagtattggttttgagagccaacaagttgtacggtcccattgagggttcaaagaccaagcatggattccccagtttagtcatttttgatgtctcttccaacaacttcagcggcccgataccaaatgcctacataaaaaattttcaagccatgaagaaaattgttgttctagacaccgatcggcaatacatgaaagttccttcaaatgtttctgagtacgctgattctgtgactataacatcaaaagcaattactatgacaatggatagaattcgaaaggactttgtaagcattgatttatcgcaaaacagatttgaaggaaagattccaagtgtcattggggaacttcattcactcagagggctcaacctttcccataacagacttagaggtcctattcccaattccatgggaaatttaacaaatttagaatcattggatctctcctcaaatatgcttactggtcggatacctacaggattaaccaatttgaactttcttgaagtcctaaatctttccaataaccattttgtgggagaaatacctcaaggaaaacagtttagtactttttccaatgattcctatgagggaaacttagggttatgtggactcccattgacaacagaatgcagcaaggaccctaaacaacattctccagcttcactaacctttaggggagaacagggatttggatttggctggaagccagtggctataggatatggatgcggaatggtctttggagtgggaatgggatgttgtgtattgttaattggaaagcctcaatggattgtgagaatggttgggggtcaactcaataaaaaggtgaaaaggaagacaaggatgagatctaatgaaaatggtagcagaatgaattagttgatatatggcatgactggagaatgtcttcttgcacaccttcctgttgaaattcaattctgccttgttgaaaataaaacataagggccaaaaccttatcacactgcattgcatatgcataggagatctgattcaaagtttagttgtaattgtaatatgatgtgttgtactttttttttctctgttggatagatagtgtgatgtactttttttccccttcctttgctcctgaaactcgggtctaaatcatcataagtttgatgttctttattttccttgagcgtgttattttgttttatttaatacatataatag

SEQ ID NO: 645 - DNA, 3054 bp, Glycine max
atgagttgttattctctgaaactattttatgcacttttgctgcttttattgcatgctgctggatccattcttggattcaacagccttcccaatagcgcagaaattaagtgcattgagagtgagagacaagcactcctcaacttcaaacatggcctcaaagatgactctggcatgctgtctacatggagggacgatggcaataacagagactgttgcaaatggaaaggcatccaatgcaacaatcaaactggtcatgttgagatgcttcatctccgtggtcaggatacacaatatttgagaggtgcaatcaatatctcttcattgattgcccttcaaaatattgaacacttggatctcagctataatgcttttcaatggagtcatatcccagaattcatgggctcgttcgccaacttacgatatctcaatctctcttattgtgcatttgttgggagtattccttctgatattggaaagcttacacatttactgtctcttgatctaggtaacaatttttttctccatggaaaaatcccttatcaacttggaaaccttacacatttacaatatcttgatctaagtgataatgatctagatggggaactcccttatcaacttggaaatctctcacagttgagatacaaaatattcaatcctctgttttattcaccttccaacttctccactgctcttaccatccttgatctttcttcaaataagctcacatcctcaatatttcaactgctgtcaaactttagccttaatcttcaggagctttatcttggtgataataacattgttttgtcgtctcctctctgcccaaattttccttctcttgttatccttgacctttcctataataatatgacatcatcagtctttcaaggtggtttcaacttcagctcaaaacttcaaaatcttgatttgggaagttgtggtcttacggatgaaagttttcttatgtcatctacttccagtatgagttattcatcttctcttgtttaccttgatctctcctcaaatctgttgaaatcatcaactatattttactggctctttaactccaccaccaatcttcatgacctttccctttatcataacatgttggaaggtcccattccagatggatttgggaaagtaatgaactctcttgaagttctttacctatccgataacaaactgcaaggcgagattccatctttctttggtaacatgtgcgcattgcagagtttagacctctcaaataacaagttgaacggggaattttctagcttcttccgaaattcttcatggtgcaacagacacatatttaagagcttgtatttatcttataaccggttgactggcatgttacctaaaagcattggattgctatcagagttggaggatcttaacttggctgggaattctttggagggtgacgtcactgaatcccatctttctaatttttccaaattaaaaaacttgtacttatcagagagctcgttgtctctgaaatttgtcccgagttgggttcctccattccaattacaatacttgcgaatcagatcttgcaagttgggccccacttttcctagttggctcaagactcaaagttctttgtatgagcttgatatttctgataacgggattaatgactctgtaccagacttgttttggaataacttgcaaaatatgatattattaaatatgtctcacaattatatcattggtgcaattcctaatatatcattgaaccttcctaagagaccatttatacttctgaattcaaatcagtttgagggtaaaattccatcatttttactacaagcttctgggctgatgctctctgaaaataatttttcagatttgttttcattcttatgtgaccaaagcacagctgcaaattttgccatattagatgtatcacacaatcaaataaaggggcaactcccagattgttggaaatcagtaaagcaattactgtttcttgatttaagttacaataaattgtcagggaagattcctatgtccatgggcgcccttgttaatatggaagccttggttttacgaaacaatagtttgatgggtgagttgccttcttctttgaagaattgcagcagtttatttatgctggacctgagtgaaaatatgttgtcgggtcgaataccatcatggattggagaaagtatgcatcaattgataatcttgaacatgcgaggaaatcacctctccggaaatctacccattcatctctgttatttgaaccgtattcaattgttggatctttcaaggaataatttgtcaagaggaattccaacttgcttaaagaatttgactgcaatgtctgaacagagcatcaactcaagtgacactctgtctcatatatattggaataataaaacttactttgaaatttatggtgtttactcattcggagtttatacgcttgacataacatggatgtggaaaggtgtgcaacgggggttcaagaatccagagttagagctcaagagcattgatctttctagtaacaatttaatgggtgaaataccaaaggaggtaggatatttgcttgggttagtttctttgaatctatcaagaaacaatttgagtggagaaattccttctcagattgggaatttaagttcactagaatcacttgacttgtcaagaaatcacatctctgggagaattccttcttctctttctgaaattgattatttgcaaaaattagacttgtcacacaactctctttcgggaagaatcccatcaggaagacattttgaaacctttgaagcctctagttttgaaggaaacattgatctttgtggcgaacaacttaacaaaacttgtcctggggatggagatcagacaacagaagagcatcaagaaccaccagtcaaaggtgatgattcagttttctatgagggattatacatgagcttggggattggatacttcactggattttggggcttattagggccattactactgtggcgtccttggagaattgcttacatgaggtttctgaacagattaacagactatgtatatgtatgcttatggtga

SEQ ID NO: 646 - DNA, 3305 bp, Glycine max
atgagttgttattctctgaaactattttatgcacttttgctgcttttattgcatgctgctggatccattcttggattcaacagccttcccaatagcgcagaaattaagtgcattgagagtgagagacaagcactcctcaacttcaaacatggcctcaaagatgactctggcatgctgtctacatggagggacgatggcaataacagagactgttgcaaatggaaaggcatccaatgcaacaatcaaactggtcatgttgagatgcttcatctccgtggtcaggatacacaatatttgagaggtgcaatcaatatctcttcattgattgcccttcaaaatattgaacacttggatctcagctataatgcttttcaatggagtcatatcccagaattcatgggctcgttcgccaacttacgatatctcaatctctcttattgtgcatttgttgggagtattccttctgatattggaaagcttacacatttactgtctcttgatctaggtaacaatttttttctccatggaaaaatcccttatcaacttggaaaccttacacatttacaatatcttgatctaagtgataatgatctagatggggaactcccttatcaacttggaaatctctcacagttgagatacaaaatattcaatcctctgttttattcaccttccaacttctccactgctcttaccatccttgatctttcttcaaataagctcacatcctcaatatttcaactgctgtcaaactttagccttaatcttcaggagctttatcttggtgataataacattgttttgtcgtctcctctctgcccaaattttccttctcttgttatccttgacctttcctataataatatgacatcatcagtctttcaaggtggtttcaacttcagctcaaaacttcaaaatcttgatttgggaagttgtggtcttacggatgaaagttttcttatgtcatctacttccagtatgagttattcatcttctcttgtttaccttgatctctcctcaaatctgttgaaatcatcaactatattttactggctctttaactccaccaccaatcttcatgacctttccctttatcataacatgttggaaggtcccattccagatggatttgggaaagtaatgaactctcttgaagttctttacctatccgataacaaactgcaaggcgagattccatctttctttggtaacatgtgcgcattgcagagtttagacctctcaaataacaagttgaacggggaattttctagcttcttccgaaattcttcatggtgcaacagacacatatttaagagcttgtatttatcttataaccggttgactggcatgttacctaaaagcattggattgctatcagagttggaggatcttaacttggctgggaattctttggagggtgacgtcactgaatcccatctttctaatttttccaaattaaaaaacttgtacttatcagagagctcgttgtctctgaaatttgtcccgagttgggttcctccattccaattacaatacttgcgaatcagatcttgcaagttgggccccacttttcctagttggctcaagactcaaagttctttgtatgagcttgatatttctgataacgggattaatgactctgtaccagacttgttttggaataacttgcaaaatatgatattattaaatatgtctcacaattatatcattggtgcaattcctaatatatcattgaaccttcctaagagaccatttatacttctgaattcaaatcagtttgagggtaaaattccatcatttttactacaagcttctgggctgatgctctctgaaaataatttttcagatttgttttcattcttatgtgaccaaagcacagctgcaaattttgccatattagatgtatcacacaatcaaataaaggggcaactcccagattgttggaaatcagtaaagcaattactgtttcttgatttaagttacaataaattgtcagggaagattcctatgtccatgggcgcccttgttaatatggaagccttggttttacgaaacaatagtttgatgggtgagttgccttcttctttgaagaattgcagcagtttatttatgctggacctgagtgaaaatatgttgtcgggtcgaataccatcatggattggagaaagtatgcatcaattgataatcttgaacatgcgaggaaatcacctctccggaaatctacccattcatctctgttatttgaaccgtattcaattgttggatctttcaaggaataatttgtcaagaggaattccaacttgcttaaagaatttgactgcaatgtctgaacagagcatcaactcaagtgacactctgtctcatatatattggaataataaaacttactttgaaatttatggtgtttactcattcggagtttatacgcttgacataacatggatgtggaaaggtgtgcaacgggggttcaagaatccagagttagagctcaagagcattgatctttctagtaacaatttaatgggtgaaataccaaaggaggtaggatatttgcttgggttagtttctttgaatctatcaagaaacaatttgagtggagaaattccttctcagattgggaatttaagttcactagaatcacttgacttgtcaagaaatcacatctctgggagaattccttcttctctttctgaaattgattatttgcaaaaattagacttgtcacacaactctctttcgggaagaatcccatcaggaagacattttgaaacctttgaagcctctagttttgaaggaaacattgatctttgtggcgaacaacttaacaaaacttgtcctggggatggagatcagacaacagaagagcatcaagaaccaccagtcaaaggtgatgattcagttttctatgagggattatacatgagcttggggattggatacttcactggattttggggcttattagggccattactactgtggcgtccttggagaattgcttacatgaggtttctgaacagattaacagactatgtatatgtatgcttatggtgaatgtgggaagtgttgcttatcgctccaatgcaaatagatgtgctgcacgcttctgatcagagaagaaagcattgttggctgctacaagtgcgaaatatttctttattatatgagtttacaaagttttgtatgtaagtaatgaactgtaaaatcttgtttccagaaacttagtatgatattgttgtattttattgtataatatatttgtaatgctgtttgtttttcattattgtgcttggatctgtgatatc

SEQ ID NO: 647 - DNA, 3150 bp, Glycine max
atgagttgttattctctgaaactattttatgcacttttgctgcttttattgcatgctgcagtatccattcttggattcaacagccttcccaatagcgcagaaattaagtgcattgagagtgagagacaagcactcctcaacttcaaacatggcctcaaagatgactctggcatgctgtctacatggagggacgatggcaataaccgagactgttgcaaatggaaaggcatccaatgcaacaatcaaactggtcatgttgagatgcttcatctccgtggtcaggatacacaatatttgagaggtgcaatcaatatctcttcattgattgcccttcaaaatattgaacacttggatctcagctataatgattttccaaggagtcatatcccagaacacatgggctcgttcaccaacttgagatatctcaatctctcttattgtgcatttgttgggagtattccttctgatattggaaagcttacacatttactgtctcttgatctaggtaacaatttttatctccatggaaaaatcccttatcaacttggaaaccttacacatttacaatatcttgatctaagttataattatctggatggggaactcccttatcaacttggaaatctctcacagttgaggtatcttgatcttgcgggggggaattcattctcgggagcactccctatccagattgggaatctttgtttgttgcacactcttggacttggtggcaattttgatgtgaaatccaaggatgcagagtggttgactaatctttcttccttgaccaaacttaggctaagttcactacacaacctttcctcttctcatcactggctacaaatgatcagcaagcttattccaaacttaagagagttgaggctagttggttgttctctttcagatacaaatattcaatctctgttttattcaccttccaacttttccactgctcttaccatccttgatctttcttcaaataagctcacatcctcaacatttcaactgttgtcaaactttccttctcttgttatccttgacctttcctataataatatgacatcatcagtctttcaaggtggtttcaacttcagttcaaaacttcaaaatcttgatctgcaaaattgtagtcttacggatggaagttttcttatgtcatcttccttcattatgagttcttcatcttctcttgttttccttgatctctcctcaaatctgttgaaatcatcaattatattttactggctctttaactccaccaccaatcttcataaccttttcctttataataacatgttagaagttcttcacctatccgataacaaactgcaaggcgagattccatctttctttggtaacatgtgcgcattgcagagtttacacctctcaaataacaagttgaacggggaattttctagcttcttccgaaattcttcatggtgcaacagacacatatttaaggagttggatttatcttataaccggttgactggcatgttacctaaaagcattggattgctatcagagttggagtatcttaacttggctgggaattctttggagggtgacgtcactgaatcccatctttctaatttttccaaattagaatacttgaacctatcagggaactcgttgtctctgaaatttgtcccgagttgggttcctccattccaattaatacagttgggactccgttcttgcgagttgggccccacttttcctagttggctcaagactcaaagttcttttcatttttggaataagttgcaaaatatgatattattaaatatgtctcacaattatctcattggttcaattcctaatatatcgttgaagcttcctctcagaccgtctatacttctgaattccaatcagtttgagggtaaaattccgtcatttttactacaagcttctgggctgatgctctctgaaaataatttttcagatttgttttcattcttatgtgaccaaagcacagcttcaaatttggccactttagatttatcacgcaatcaaataaaggggcaactgccagattgttggaaatcagtaaagcaattactgttccttgatttaagcagcaataaattgtcagggaagattcctatgtccatgggcgcccttgttaatatggaagccttggttttacgaaacaatggtttaatgggtgagttaccttcttctttgaagaattgcagcagtttatttatgctggacctgagtgaaaatatgttgtcgggtccaataccatcatggattggagaaagtatgcatcaattgataatcttgaacatgcgaggaaatcacctctccggaaatctacccattcatctctgttatttgaaccgtattcaattgttggatctttcaaggaataatttgtcaagaggaattccatcatgcttaaagaatttcactgcaatgtctgaacagaccatcaactcaagtgacactatgtctcgtatatattggtataataacacttaccatgcaatttatggtttctcatcgggagattatacgcttgacataacatggatgtggaaaggtgtggaacaggggttcaagaatccagagttaaagctcaagagcattgatctttccagtaaccatttaaccggtgaaataccaaaggaggtcggatatttgcttgggttagtttctttgaatctatcaagaaacaatttgagtggagaaattccttctcggattgggaatttaaggtcactagaatcacttgacttgtcaagaaatcacatctctgggagaattccttcttctctttctgaaattgattatttgcaaaaattagacttgtcacacaactctctttctggaagaatcccatcaggaagacattttgaaacctttgaagcctctagttttgaaggaaacattgatctttgtggtgaacaacttaacaaaacttgtcctggggatggagatcagacaacagaagagcatcaagaaacagcagtcaaaggtgatgattcagttttctatgagggattatacatgagcttggggattggatacttcactggattttggggcttattagggccattactactgtggcctccttggagaattgcttacatgaggtttctgaacagattaacagactatgtatatgtatgcttattgtga

SEQ ID NO: 648 - DNA, 3595 bp, Glycine max
atgagttgttattctctgaaactattttatgcacttttgctgcttttattgcatgctgcagtatccattcttggattcaacagccttcccaatagcgcagaaattaagtgcattgagagtgagagacaagcactcctcaacttcaaacatggcctcaaagatgactctggcatgctgtctacatggagggacgatggcaataaccgagactgttgcaaatggaaaggcatccaatgcaacaatcaaactggtcatgttgagatgcttcatctccgtggtcaggatacacaatatttgagaggtgcaatcaatatctcttcattgattgcccttcaaaatattgaacacttggatctcagctataatgattttccaaggagtcatatcccagaacacatgggctcgttcaccaacttgagatatctcaatctctcttattgtgcatttgttgggagtattccttctgatattggaaagcttacacatttactgtctcttgatctaggtaacaatttttatctccatggaaaaatcccttatcaacttggaaaccttacacatttacaatatcttgatctaagttataattatctggatggggaactcccttatcaacttggaaatctctcacagttgaggtatcttgatcttgcgggggggaattcattctcgggagcactccctatccagattgggaatctttgtttgttgcacactcttggacttggtggcaattttgatgtgaaatccaaggatgcagagtggttgactaatctttcttccttgaccaaacttaggctaagttcactacacaacctttcctcttctcatcactggctacaaatgatcagcaagcttattccaaacttaagagagttgaggctagttggttgttctctttcagatacaaatattcaatctctgttttattcaccttccaacttttccactgctcttaccatccttgatctttcttcaaataagctcacatcctcaacatttcaactgttgtcaaactttccttctcttgttatccttgacctttcctataataatatgacatcatcagtctttcaaggtggtttcaacttcagttcaaaacttcaaaatcttgatctgcaaaattgtagtcttacggatggaagttttcttatgtcatcttccttcattatgagttcttcatcttctcttgttttccttgatctctcctcaaatctgttgaaatcatcaattatattttactggctctttaactccaccaccaatcttcataaccttttcctttataataacatgttagaagttcttcacctatccgataacaaactgcaaggcgagattccatctttctttggtaacatgtgcgcattgcagagtttacacctctcaaataacaagttgaacggggaattttctagcttcttccgaaattcttcatggtgcaacagacacatatttaaggagttggatttatcttataaccggttgactggcatgttacctaaaagcattggattgctatcagagttggagtatcttaacttggctgggaattctttggagggtgacgtcactgaatcccatctttctaatttttccaaattagaatacttgaacctatcagggaactcgttgtctctgaaatttgtcccgagttgggttcctccattccaattaatacagttgggactccgttcttgcgagttgggccccacttttcctagttggctcaagactcaaagttcttttcatttttggaataagttgcaaaatatgatattattaaatatgtctcacaattatctcattggttcaattcctaatatatcgttgaagcttcctctcagaccgtctatacttctgaattccaatcagtttgagggtaaaattccgtcatttttactacaagcttctgggctgatgctctctgaaaataatttttcagatttgttttcattcttatgtgaccaaagcacagcttcaaatttggccactttagatttatcacgcaatcaaataaaggggcaactgccagattgttggaaatcagtaaagcaattactgttccttgatttaagcagcaataaattgtcagggaagattcctatgtccatgggcgcccttgttaatatggaagccttggttttacgaaacaatggtttaatgggtgagttaccttcttctttgaagaattgcagcagtttatttatgctggacctgagtgaaaatatgttgtcgggtccaataccatcatggattggagaaagtatgcatcaattgataatcttgaacatgcgaggaaatcacctctccggaaatctacccattcatctctgttatttgaaccgtattcaattgttggatctttcaaggaataatttgtcaagaggaattccatcatgcttaaagaatttcactgcaatgtctgaacagaccatcaactcaagtgacactatgtctcgtatatattggtataataacacttaccatgcaatttatggtttctcatcgggagattatacgcttgacataacatggatgtggaaaggtgtggaacaggggttcaagaatccagagttaaagctcaagagcattgatctttccagtaaccatttaaccggtgaaataccaaaggaggtcggatatttgcttgggttagtttctttgaatctatcaagaaacaatttgagtggagaaattccttctcggattgggaatttaaggtcactagaatcacttgacttgtcaagaaatcacatctctgggagaattccttcttctctttctgaaattgattatttgcaaaaattagacttgtcacacaactctctttctggaagaatcccatcaggaagacattttgaaacctttgaagcctctagttttgaaggaaacattgatctttgtggtgaacaacttaacaaaacttgtcctggggatggagatcagacaacagaagagcatcaagaaacagcagtcaaaggtgatgattcagttttctatgagggattatacatgagcttggggattggatacttcactggattttggggcttattagggccattactactgtggcctccttggagaattgcttacatgaggtttctgaacagattaacagactatgtatatgtatgcttattgtgaatgtgggaattgttgctgatcgctccaaggcaaaaagatgtgctgcagacttctgatcagagaagaaaccattgttggcagctacaaatgcgagataatttctttaatataggagtttacaatgttttgtatttaagtaatgaactgcaaaatcttgtttccagaaagttagtatgctattgttgtatttattgtatttgtaatgctgtttgtttttcattattgtgcttagatctgtgatatctaaaatttcaccacttcatattcatcttcaacaatgctttctactatattctcctagtgcagctatacttaactgtgaatcaaatttgtgcatgagaagaagaatgcaagataccctatttgttcctagttactaccagtgtatttgcatccttgtgttagaccccttctgtacatgcacttttgctttgccaaaagtagc

SEQ ID NO: 649 - DNA, 2706 bp, Glycine max
atgatcagcaagcttattccaaacttaagagagttgaggctatttgattgttctctttcagatacaaatattcaatctctgttttattcaccttccaacttttccactgctcttaccatccttgatctttctttcaataagctgacatcctcaacatttcaactgttgtcaaactttagccttaatcttcaggagctttatcttcgtgataataacattgttttgtcatctcctctctgcccaaagtttccttctcttgttatccttgacctttcctattgttctctttcagatacaaatattcaatctctgttttattcaccttccaacttttccactgctcttaccgtccttgatctttcttcaaataagctcacatcctcaacatttcaactgttgtcaaactttagtcttaatcttcaggagctttatcttggtgataatagcattgttttgtcatctcctctctgcccaaactttccttctcttggtatccttgacctttcctataataatatgacatcatcagtctttcaaggtggtttcaacttcagctcaaaacttcaaaatcttcatttgcaaaattgtagtcttacggatggaagttttcttatgtcatcttcttccagtatgagttcttcatcttctcttgttttccttgatctctcctcaaatctgttgaaatcatcaactatattttactggctctttaactccaccaccaatcttcatgaccttttccttgatgagaacatgttagaaggtcccattccagatggatttgggaaagtaatgaactctcttgaagctctttacctctccggtaacaaactgcaaggcgagattccatctttctttggtaacatgtgcacattgcaggggttaggcctctcaaataacaagttgaatggggaaatttctagcttcttccaaaattcttcatggtgcagcagagacatatttaaggagttggatttatctgataaccggttgactggcatgttacctaaaagcattcgattgttatcagagctggagtttcttaacttggctgggaattctttggagggtgacgtcactgaatcccatctttctaatttttccaaattaaaatacttgtacttatcagagaactcgttgtctctgaaatttgtcccgagttgggttccctcattccaattagaatacttgggaatcagatcttgcgagttgggccccacttttcctagttggctcaagactcaactttccataacttttctggatatttctgatagtgggcttaatggttcagtaccagaatggttttggaagaacttgcaaaatgtgcaaaaattgaatatgtcacacaacaatctcacaggttcaattccgaatttgccactaaagcttcttaatagaccatctataattttgaattcaaatcaatttatgggcaaagttccgtcatttttgctacaagcttcgaagctaaagctcagtcataataaactttcgggtttgtcttcatttttgtgtgaccaaagtgcagctggaaacttgggccttttagatttatcaaacaatcagataaaggaacaaattccagattgttggaagcgtgtagatacactactggttcttgatttaagccacaataaattgtctgggaagattcccatttccttgagcacccttgttaaattgaaagcattggttttaggctacaataatttaatgggtggattgccttctactttgaagaattgcagcaatttaattatgcttgatgtgggtgaaaatatgttatccggtccaataccatcatggatcggagaaagtatgcaccaactgataatcttgaacatgagagggaataacttctctggaaatcttcccaatcatctttgctatttgaagcacattcaattgttggatctttcacggaataagttatccaaaggaattccaacgtgcttaaagaattttactgcattgtctgaaaaaagcatcaacagaagtgatactatgtatcgtgtatattggtacaatcgtacttactacgaagtttacagtagtctcagtttgggtgattatacgtttgacataacatggatgtggaaaggtgtggaacatgggttcagaaatccagaattgtttctcaagagcattgatctttcaagtaataatttaacaggtgaaataccaaaagaggttggatatttgcttgggttagtttctttgaatttatcaagaaacaatctgagtggagaaattcctccagagattggaaatttaagttcgctagattcccttgacttatcaagaaatcatttcattgggcaaattccttcttctctttctgaaattgatggtctaggcaaattagacttgtcagacaattctctttccggaagaatcccatcaggaagacatttcgagacctttgatgcctctagttttgaaggaaatgttgatctttgtggtgaacaacttaacaaaacttgtcctggagaaggggaacagacaacagcaaagcctcaagaatcagcagtcaacggtgatgattcggttttctatgaagcattatacatgagcttggggattggatacttcattgggttttggggcttcttaggaccaatactactttggcgtccttggagaaatgcttacatgaggttcctgaacagattgacaggctacatatatgtatggttgttgtaa

SEQ ID NO: 650 - DNA, 3669 bp, Glycine max
agtaaccgatctttgttttactcttagtcatttcataatgagttgttattctctgaaactattttatgcacttttgctgcttttattgcatgctgcaggatccattcttggattcaacagccttcccaatagcgcagaaattaagtgcattgagagtgagagacaagcactcctcaacttcaaacatggcctcaaagatgactccggcatgctgtctacatggagggacgatggcaataacagagactgttgcaaatggaaaggcattcaatgcaataatcaaactggtcatgttgagatgcttcatctccgtggtcatggtacacaatatttgagaggtgcaatcaatatctcttcattgattgcccttcaaaatattgaacacttggatctcagctctaatacttttccatggagtcatatcccagaacacatgggctcgttcaccaacttaagatatctcaatctctctcattgtttatttggtgggagtattccttctgatattggaaagcttacacatttactgtctcttgatctaggttgggaatcttcctttgttgcacactctcagacttggtggcaattttgatgtgaaatataaggatgcagagtggttgactaatctttcttccttgacaaaacttgagctaagttcactacgcaacctttcctcttctcatcactggctacaaatgatcagcaagcttattccaaacttaagagagttgaggctatttgattgttctctttcagatacaaatattcaatctctgttttattcaccttccaacttttccactgctcttaccatccttgatctttctttcaataagctgacatcctcaacatttcaactgttgtcaaactttagccttaatcttcaggagctttatcttcgtgataataacattgttttgtcatctcctctctgcccaaagtttccttctcttgttatccttgacctttcctattgttctctttcagatacaaatattcaatctctgttttattcaccttccaacttttccactgctcttaccgtccttgatctttcttcaaataagctcacatcctcaacatttcaactgttgtcaaactttagtcttaatcttcaggagctttatcttggtgataatagcattgttttgtcatctcctctctgcccaaactttccttctcttggtatccttgacctttcctataataatatgacatcatcagtctttcaaggtggtttcaacttcagctcaaaacttcaaaatcttcatttgcaaaattgtagtcttacggatggaagttttcttatgtcatcttcttccagtatgagttcttcatcttctcttgttttccttgatctctcctcaaatctgttgaaatcatcaactatattttactggctctttaactccaccaccaatcttcatgaccttttccttgatgagaacatgttagaaggtcccattccagatggatttgggaaagtaatgaactctcttgaagctctttacctctccggtaacaaactgcaaggcgagattccatctttctttggtaacatgtgcacattgcaggggttaggcctctcaaataacaagttgaatggggaaatttctagcttcttccaaaattcttcatggtgcagcagagacatatttaaggagttggatttatctgataaccggttgactggcatgttacctaaaagcattcgattgttatcagagctggagtttcttaacttggctgggaattctttggagggtgacgtcactgaatcccatctttctaatttttccaaattaaaatacttgtacttatcagagaactcgttgtctctgaaatttgtcccgagttgggttccctcattccaattagaatacttgggaatcagatcttgcgagttgggccccacttttcctagttggctcaagactcaactttccataacttttctggatatttctgatagtgggcttaatggttcagtaccagaatggttttggaagaacttgcaaaatgtgcaaaaattgaatatgtcacacaacaatctcacaggttcaattccgaatttgccactaaagcttcttaatagaccatctataattttgaattcaaatcaatttatgggcaaagttccgtcatttttgctacaagcttcgaagctaaagctcagtcataataaactttcgggtttgtcttcatttttgtgtgaccaaagtgcagctggaaacttgggccttttagatttatcaaacaatcagataaaggaacaaattccagattgttggaagcgtgtagatacactactggttcttgatttaagccacaataaattgtctgggaagattcccatttccttgagcacccttgttaaattgaaagcattggttttaggctacaataatttaatgggtggattgccttctactttgaagaattgcagcaatttaattatgcttgatgtgggtgaaaatatgttatccggtccaataccatcatggatcggagaaagtatgcaccaactgataatcttgaacatgagagggaataacttctctggaaatcttcccaatcatctttgctatttgaagcacattcaattgttggatctttcacggaataagttatccaaaggaattccaacgtgcttaaagaattttactgcattgtctgaaaaaagcatcaacagaagtgatactatgtatcgtgtatattggtacaatcgtacttactacgaagtttacagtagtctcagtttgggtgattatacgtttgacataacatggatgtggaaaggtgtggaacatgggttcagaaatccagaattgtttctcaagagcattgatctttcaagtaataatttaacaggtgaaataccaaaagaggttggatatttgcttgggttagtttctttgaatttatcaagaaacaatctgagtggagaaattcctccagagattggaaatttaagttcgctagattcccttgacttatcaagaaatcatttcattgggcaaattccttcttctctttctgaaattgatggtctaggcaaattagacttgtcagacaattctctttccggaagaatcccatcaggaagacatttcgagacctttgatgcctctagttttgaaggaaatgttgatctttgtggtgaacaacttaacaaaacttgtcctggagaaggggaacagacaacagcaaagcctcaagaatcagcagtcaacggtgatgattcggttttctatgaagcattatacatgagcttggggattggatacttcattgggttttggggcttcttaggaccaatactactttggcgtccttggagaaatgcttacatgaggttcctgaacagattgacaggctacatatatgtatggttgttgtaaatgtggcaaagtgttgctggtggctttaaggcaaaaagatgtgctgcacgcttcgggtcagagaagaaatcattgttggcagctacaagtgcgagatatttctttagtataggagtttacaatgtttggtatgaactgcaaaatcttgtttccagaaacttagtatgatattgttgtattttattgtataatatgtttgtaatgctgtttgtttttcattattgtgcttagatctgtgatatctagaatttgacaacttaatatttca

SEQ ID NO: 651 - DNA, 3339 bp, Glycine max
atgagttgttattctctgaaactattttatgcacttttgctgcttttattgcatgctgctggatccattcttggattcaacagccttcccaatagcgcagaaattaagtgcattgagagtgagagacaagcactcctcaacttcaaacatggcctcaaagatgactctggcatgctgtctacatggagggacgatggcaataacggagactgttgcaaatggaaaggcattcaatgcaacaatcaaactggtcatgttgagatgcttcatctccgtggtcaggatacacaatatttgagaggtgcaatcaatatctcttcattgattgcccttgaaaatattgaacacttggatctcagctataatgcttttgaatggagacatatcccagaactcttgggctcgttcgccaacttaagatatctcaatctctctgtttgtttttttattgggagtattccttctgatattggaaagcttacacatttactgtctcttgatctaggtaacaatttttatctccgtggaaaaatcccttatcaacttggaaaccttacacatttacaatatcttgatctaagttataatgatctcgatggggaactcccatatcaacttggaaatctctcacagttgaggtatcttgatcttgcggggtggaattcattttcgggagcactccctttccaagttgggaatcttcctttattgcacactcttggacttggtggcaattttgatgtgaaatctaaggatgcagagtggttgactaatctttcttccttgacaaaacttaggctaagttcactacacaacctttcctcttctcatcactggctacaaatgatcagcaagcttattcctaacttaaaagagttgaggctatttgattgttctctttcagatacaaatattcaatctctgttttattcaccttccaacttctccactgctcttaccatccttgatctttctaaaaataagctcacatcctcaacatttcaactgttgtcaaactttagtcttaatcttcaggagctttatcttggtcataataacattgttttgtcatctcctctctgcccaaactttccttctcttgtgatccttgacctttcctataataatatgacatcatcagtctttcaaggtggtttcaacttcagctcaaaacttcaaaatctggatttgcaaaattgtagtcttacggatgaaagttttcttatgtcatcttctttcattatgcgttcttcatcttctcttgtttcccttgatctctcctcaaatctgttgaaatcatcaactatattttactggctctttaactccaccaccaatcttcatgaccttttactttataataaaatgttagaaggtcccattccagatggatttgggaaagtaatgaactctcttgaaattcttcacctctccagtaacaaactgcaaggcgagattccatctttctttggtaacatgtgcgcattgcagaggttagacctctcaaataacaagttgaacggggaattttctagcttcttccgaaattcttcatggtgcaacagacacatatttaagagcttggatttatcttataaccggttgactggcatgttacctaaaagcattggattgctatcagaattggaggatcttaacttggctgggaattctttggagggtgacgtcactgaatcccatctttctaatttttccaaattagaatacttggacctatcagggaactcgttgtctctgaaatttgtcccgagttgggttcctccattccaattagaatatttgagaatcagatcttgcaagttgggccccacttttcctagttggctcaagactcaaagatctttgtctgagcttgatatttctgataatgggattaatgactctgtaccagacttgttttggaataacttgcaatatatggtattcttaaatatgtctcacaattatctcattggttcaattcctaatatatcgttgaagcttcctctcagaccgtctatacttctgaattcaaatcagtttgagggtaaaattccgtcatttttactacaagcttcccagctgatgctctctgaaaataatttttcagatttgttttcattcttatgtgaccaaagcacagcttcaaatttggccactttagatgtatcacacaatcaaataaaggggcaactgccagattgttggaaatcagtaaagcaattactgtttcttgatttaagcagcaataaattgtcagggaagattcctatgtccatgggcgcccttgttaatatggaagccttggttttacgaaacaatggtttaatgggtgagttaccttcttctttgaagaattgcagcagtttatttatgctggacctgagtgaaaatatgttgtcgggtccaataccatcatggattggagaaagtatgcagcaattgataatcttgaacatgcgaggaaatcacctctccggaaatctacccattcatctctgttatttgaactgtattcaattgttggatctttcaaggaataatttgtcaagaggaattccatcatgcttaaagaatttcactgcaatgtctgaacagagcatcaactcaagtgacactatgtctcgtatatattggtataataacacttactttgaaatttatggtctttactcattcggaggttatacgcttgacataacatggatgtggaaaggtgtggaacaggggttcaagaatccagagttaaagctcaaaagcattgatttttccagtaacaatttaacgggtgaaataccaaaggaggtcggatatttgcttgggttagtttctttgaatctatcaagaaacaatttgagtggagaaattccttctcggattgggaatttaaggtcactagaatcacttgacttgtcaagaaatcacatctctgggagaattccttcttctctttctgaaattgattatttgcaaaaattagacttgtcacacaactctctttctggaagaatcccatcaggaagacattttgaaacctttgaagcctctagttttgaaggaaacactgatctttgtggtgaacaacttaacaaaacttgtcctggggatggagatcagacaacagcagagcatcaagaaccagcagtcaaaggtgatgattcagttttctatgagggattatacatgagcttggggattggatacttcactggattttggggcttattagggccattactactgtggcgtccttggagaattgcctacatcagatttctgaacaggttaacagactatgtatatgtatgttatggtgaatgtggtgggaagttttgctga

SEQ ID NO: 652 - DNA, 3626 bp, Glycine max
agtgatcacagtaaccgatctttgttttactcttagtcatttcataatgagttgttattctctgaaactattttatgcacttttgctgcttttattgcatgctgctggatccattcttggattcaacagccttcccaatagcgcagaaattaagtgcattgagagtgagagacaagcactcctcaacttcaaacatggcctcaaagatgactctggcatgctgtctacatggagggacgatggcaataacggagactgttgcaaatggaaaggcattcaatgcaacaatcaaactggtcatgttgagatgcttcatctccgtggtcaggatacacaatatttgagaggtgcaatcaatatctcttcattgattgcccttgaaaatattgaacacttggatctcagctataatgcttttgaatggagacatatcccagaactcttgggctcgttcgccaacttaagatatctcaatctctctgtttgtttttttattgggagtattccttctgatattggaaagcttacacatttactgtctcttgatctaggtaacaatttttatctccgtggaaaaatcccttatcaacttggaaaccttacacatttacaatatcttgatctaagttataatgatctcgatggggaactcccatatcaacttggaaatctctcacagttgaggtatcttgatcttgcggggtggaattcattttcgggagcactccctttccaagttgggaatcttcctttattgcacactcttggacttggtggcaattttgatgtgaaatctaaggatgcagagtggttgactaatctttcttccttgacaaaacttaggctaagttcactacacaacctttcctcttctcatcactggctacaaatgatcagcaagcttattcctaacttaaaagagttgaggctatttgattgttctctttcagatacaaatattcaatctctgttttattcaccttccaacttctccactgctcttaccatccttgatctttctaaaaataagctcacatcctcaacatttcaactgttgtcaaactttagtcttaatcttcaggagctttatcttggtcataataacattgttttgtcatctcctctctgcccaaactttccttctcttgtgatccttgacctttcctataataatatgacatcatcagtctttcaaggtggtttcaacttcagctcaaaacttcaaaatctggatttgcaaaattgtagtcttacggatgaaagttttcttatgtcatcttctttcattatgcgttcttcatcttctcttgtttcccttgatctctcctcaaatctgttgaaatcatcaactatattttactggctctttaactccaccaccaatcttcatgaccttttactttataataaaatgttagaaggtcccattccagatggatttgggaaagtaatgaactctcttgaaattcttcacctctccagtaacaaactgcaaggcgagattccatctttctttggtaacatgtgcgcattgcagaggttagacctctcaaataacaagttgaacggggaattttctagcttcttccgaaattcttcatggtgcaacagacacatatttaagagcttggatttatcttataaccggttgactggcatgttacctaaaagcattggattgctatcagaattggaggatcttaacttggctgggaattctttggagggtgacgtcactgaatcccatctttctaatttttccaaattagaatacttggacctatcagggaactcgttgtctctgaaatttgtcccgagttgggttcctccattccaattagaatatttgagaatcagatcttgcaagttgggccccacttttcctagttggctcaagactcaaagatctttgtctgagcttgatatttctgataatgggattaatgactctgtaccagacttgttttggaataacttgcaatatatggtattcttaaatatgtctcacaattatctcattggttcaattcctaatatatcgttgaagcttcctctcagaccgtctatacttctgaattcaaatcagtttgagggtaaaattccgtcatttttactacaagcttcccagctgatgctctctgaaaataatttttcagatttgttttcattcttatgtgaccaaagcacagcttcaaatttggccactttagatgtatcacacaatcaaataaaggggcaactgccagattgttggaaatcagtaaagcaattactgtttcttgatttaagcagcaataaattgtcagggaagattcctatgtccatgggcgcccttgttaatatggaagccttggttttacgaaacaatggtttaatgggtgagttaccttcttctttgaagaattgcagcagtttatttatgctggacctgagtgaaaatatgttgtcgggtccaataccatcatggattggagaaagtatgcagcaattgataatcttgaacatgcgaggaaatcacctctccggaaatctacccattcatctctgttatttgaactgtattcaattgttggatctttcaaggaataatttgtcaagaggaattccatcatgcttaaagaatttcactgcaatgtctgaacagagcatcaactcaagtgacactatgtctcgtatatattggtataataacacttactttgaaatttatggtctttactcattcggaggttatacgcttgacataacatggatgtggaaaggtgtggaacaggggttcaagaatccagagttaaagctcaaaagcattgatttttccagtaacaatttaacgggtgaaataccaaaggaggtcggatatttgcttgggttagtttctttgaatctatcaagaaacaatttgagtggagaaattccttctcggattgggaatttaaggtcactagaatcacttgacttgtcaagaaatcacatctctgggagaattccttcttctctttctgaaattgattatttgcaaaaattagacttgtcacacaactctctttctggaagaatcccatcaggaagacattttgaaacctttgaagcctctagttttgaaggaaacactgatctttgtggtgaacaacttaacaaaacttgtcctggggatggagatcagacaacagcagagcatcaagaaccagcagtcaaaggtgatgattcagttttctatgagggattatacatgagcttggggattggatacttcactggattttggggcttattagggccattactactgtggcgtccttggagaattgcctacatcagatttctgaacaggttaacagactatgtatatgtatgttatggtgaatgtggtgggaagttttgctgaacgctccaaggcaaaaagatgtgctgcacgcttctgatcagagaagaaaccattgttggcagctacaaatgcgagataattctttagtataggagtttacaatgttttgtatttaagtaatgaactgcaaaatcttgtttccagaaacttagtatgctattgttgtatttattgtataatatatttgtaatgctgcttgtttttcattattgtgcttagatctgtgatatctaaaatttca

SEQ ID NO: 653 - DNA, 2614 bp, Glycine max
atgggtggttactttctcaaaatcttgtttgcattgttagtgtgctttttgcataccgaaatatccattcttggattgaactctacatcggagatctcacgtgtgaaatgcattgaaagtgagagacaagccctcctcaacttcaaacgtggccttgtaaatgactctggcatgctctctacatggagggatgatgaaaataacagagattgttgcaaatggaaaggccttcaatgcaataatgaaacaggtcacgtctacatgcttgatcttcatggtcactacccacaacgtttgtcatgtctaatcaatatttcttcattgattgacttgcaaaatattgaatatttgaatcttagcaataatgattttgaagggagttacataccaaaatttatgggctcgttcaccaacttaaaatatcttgatctatcatggtcgaggtttggtgggagaattccttatgaattggggaatctctcaaagttggagtatcttgatcttaaatggaattctcttgatggagcaataccttctcaactagggaagcttacaagtttacagcatctagatctaagcctaaattctcttagtggagaaatcccttctgaagtaggggtgcttacaagcttacaacatctagatctaagtagaaattctcttcgtggagaaatcccttctgaagtagggaagcttacaagcttacgacacttagatctaagcttcaattcttttcgtggagaaatccattctgaagtagggatgcttacaagcttgcaacatctagatctgagtggaaattctcttcttggagaaatcccttctgaagtagggaagcttacagccttacgatatctagatctaagttataatgtggctattcatggagagatcccttatcactttaagaatctctcacaactgcaatatctttgtcttagaggacttaatctttccggaccaatacctttccgggttgggaatcttcctatcttgcatactcttagacttgaaggcaattttgatcttaaaattaacgatgcaaagtggctatcttctctctcttttttaacaactcttgacctgacatcattgcataatcttggctcctctcgttactggcaacaaatgatcggtgagcttataacaaacttgagagagttgagtctagttgattgtaatctcactgatgaaagtgttgtgctatatgcttccattcaaaattcatcatctcctcttgtcacccttaaccttaatgataactcgttagaaggtgaaattcctgcttttttatcccacgcttatgcattagatttttccaacaataagatttcaggcttaaacacattcttgtgtggaaaaagagcaagtacaaacctacacactttggacttatcaagtaatcgaataatgggacaactgcccaactgttgggaacatctaaatacattagaatttcttgatctgagcaataataaattgtcaggcaagattccacagtccatgggtacacttgttaatttggaagctttggtcttaagacacaacaattttattggagacctaccattcaccttgaagaactgcactcgtttagatatactagacttgagtgaaaatttgttgtctggtccaataccgtcatggattggacaaagtttacaacaattacaaatcttgagcttgcgtgtaaaccactttaatggaagtgttcctgttcatctctgttatttgaggcaaattcatatcttggatctttcaagaaataacttgtcaaaaggaattccaacttgtctaaggaactatactgcgatgatggaaagcagagtaatcacaagtcaaattgtaatggggcgaagaatatcatctacatcaatctcccctctcatttatgactctaatgtgttattgatgtggaaaggtcaggatcatatgtattggaatccagagaatcttctaaagagcattgatctctcaagtaatgatttaacaggtgaagtaccaaaagagcttggatatttacttggattggtatctttgaatttatcgagaaacaacttacatggacaaattccttctgagattgggaatttaaattcgttagaatttcttgacttatcaagaaatcatatctcaggaaaaattccatctactctttccaaaattgaccgtcttgctgtcttagacttatcaaacaacgatctcaatggaagaatcccttggggaagacagttgcaaacctttgatggctctagttttgaaggaaatacgaatctttgtggtcaacaacttaacaaaagttgtcctggtgaagatgaagattcaatattctatggagcattatatatgagcttgggcctaggattcttcgcaggcttttggggcttattagggccaatactactttggcaaccatggagaattgcttacctgagattcttgaacagactcacagactatatacttctaatggtggaagtgaacatggccaagtgccatatgtggttcaaaggctagtagtttatggcgtattagcttcaaaatttcaatccgggatgaaagcttcatgaatagctgaaggtgtacgatatgtactatgtagtattgatgtttg

SEQ ID NO: 654 - DNA, 603 bp, Glycine max
atgtggaaaggtgtggaatgggggttcaagaatccagagttagagctcaagagcattgatctttccagtaacaatttaatgggtgaaataccaaaggaggtcggatatttgcttgggttagtttctttgaatctatcaagaaacaatttgagtggagaaattccttctcggattgggaatttaaggtcactagaatcacttgacttgtcaagaaatcacatctctcggagaattccttcttctctttctgaaattgattatttgcaaaaattagacttgtcacacaactctctgtctggaagaatcccatcaggaagacattttgaaacctttgaagcctctagttttgaaggaaacattgatctttgtggtgaacaacttaacaaaacttgtcctggggatggagatcagacaacagaagagcatcaagaaccaccagtcaaaggtgatgattcagttttctatgagggattatacatcagcttggggattggatacttcactggattttggggcttattagggccattactactgtggcctccttggagaattgcttacatcagagcaatatggatttcacttagaggaggccaagaataa

SEQ ID NO: 655 - DNA, 603 bp, Glycine max; identical to SEQ ID NO: 654

SEQ ID NO: 656 - DNA, 3024 bp, Glycine max
atgagttgttattctctgaaactattttatgcacttttgctgcttttattgcatgctgcagtatccattcttggattcaacagccttcccaatagcgcagaaattaagtgcattcagactgagagacaagcactcctcaacttcaaacatggcctcatagatggctatggcattctctctacatggagtgacgatgacagtaacagagactgttgcaaatggaaaggcattcaatgcaacaatcaaactggtcatcttacacatttactgtctcttgatctaggtaagaatctttatctctatggacaaatcccttatcaacttggaaaccttacacatttacaatatcttgatctaagtgataatgatctagatggggaactcccttatcaacttggaaatctctcacagttgaggtatcttgatcttgcgggggggaattcattctcgggagcactccctatcctgattgggaatcttcctttgttgcacactcttggacttggtggcaaatttgatgtgaaatctaaggatgcagagtggttgactaatctttcttccttgacaaaacttaggctaagttcactacacaacctttcctcttctcatcactggctacaaatgatcagcaagcttattccaaacttaagagagttgaggctagttggttgttctctttcagatacaaatattcaatctctgttttattcaccttccaacttttccactgctcttaccatccttgatctttcttcaaataagctcacatcctcaacatttcaactgttgtcaaactttccttctcttgttatccttgacctttcctataataatatgacatcatcagtctttcaaggtggtttcaacttcagttcaaaacttcaaaatcttgatttgcaaaattgtagtcttacggatggaagttttcttatgtcatcttctttcattatgcgttcttcatcttctcttgtttcccttgatctctcctcaaatctgttgaaatcatcaactatattttactggctctttaactccaccaccaatcttcataaccttgtccttgattataacatgttagaaggtaccattccagatggatttgggaaagtaatgaactctcttgaagttcttgacctctacggtaacaaactgcaaggcgagattccatctttctttggtaaaatgtgcgcattgcaggggttacggctctcaaataacaagttgaacggggaattctctagcttcttccgaaattcttcatggtgcaacagagacatatttacgaggttggatttatcttataaccggttgactggcatgttacctaaaagcattggtttgctatcagagttggagcttcttttcttggatgggaattctttggagggtgacgtcactgaatcccatctttctaatttttccaaattaaaattcttgtccctatcagagaactcgttgtctctgaaattagtcccgagttgggttcctccattccaattagaaaaattggaactcagttcttgcaagttgggccccacttttcctagttggctcaagactcaaagttctttgttttggcttgatatttctgataacgggattaatgactctgtaccagactggttttggaataacttgcaaaatatgatgttattaaatatgtctcacaattatatcattagtgcaattcctaatatatccttgaagcttcctttcagaccatttatacatctgaaatcgaatcagtttgagggtaaaattccgtcatttttactacaagcttcccatctgattctctctgaaaataatttttcagatttgttttcattcttatgtgaccaaagcacagcttcaaatttggccactttagatttatcacgcaatcaaataaaggggcaactgccagattgttggaaatcagtaaagcaattactgttccttgatttaagcagcaacaaattgtcagggaagattcctatgtccatgggcgcccttgttaatatggaagccttggttttacgaaacaatggtttaatgggtgagttgccttcttctttgaagaattgcagcactttatttatgctggacctgagtgaaaatatgttgtcgggtccaataccatcatggattggagaaagtatgcagcaattgataatcttgaacatgcgaggaaatcacttctcaggaaatctacccattcatctctgttatttgaaccgtattcaattgttggatctttcaaggaataatttgtcaagaggaattccatcatgcttaaagaatttcactgcaatgtctgaacagagcatcaactcaagtgacactctgtctcgtatatattggcataataagacttaccatgatatttatggtcttcacttattcggaggttatacgcttgacataacatggatgtggaaaggtgtggaacaggggttcaagaatccagagttacagctcaaaagcattgatctttccagtaacaatttaaccggtgaaataccaaaggaggtcggatatttgcttgggttagtttctttgaatctatcaagaaacaatttgagtggagaaattccttctcggattgggaatttaaggtcactagaatcacttgacttgtcaagaaatcacatctctgggagaattccttcttctctttctgaaattgatgatttgggaaaattagacttgtcacacaactctctttctggaagaatcccatcaggaagacattttgaaacctttgaagcctccttttttgaaggaaacactgatctttgtggccaacaacttaacaaaacttgtcctggggatggagaacagacaacagcagagcatcaagaaccaccagtcaaaggtgatgattcagttttctatgagggattatacatcagcttggggattggatacttcactggattttggggcttattagggccattgctactgtggcgtccttggagaattgcttacatcaggtttctgaacagattaacagactatgtatatgtatgcttattgtga

SEQ ID NO: 657 - DNA, 3246 bp, Glycine max
atgagttgttattctctgaaactattttatgcacttttgctgcttttattgcatgctgcagtatccattcttggattcaacagccttcccaatagcgcagaaattaagtgcattcagactgagagacaagcactcctcaacttcaaacatggcctcatagatggctatggcattctctctacatggagtgacgatgacagtaacagagactgttgcaaatggaaaggcattcaatgcaacaatcaaactggtcatcttacacatttactgtctcttgatctaggtaagaatctttatctctatggacaaatcccttatcaacttggaaaccttacacatttacaatatcttgatctaagtgataatgatctagatggggaactcccttatcaacttggaaatctctcacagttgaggtatcttgatcttgcgggggggaattcattctcgggagcactccctatcctgattgggaatcttcctttgttgcacactcttggacttggtggcaaatttgatgtgaaatctaaggatgcagagtggttgactaatctttcttccttgacaaaacttaggctaagttcactacacaacctttcctcttctcatcactggctacaaatgatcagcaagcttattccaaacttaagagagttgaggctagttggttgttctctttcagatacaaatattcaatctctgttttattcaccttccaacttttccactgctcttaccatccttgatctttcttcaaataagctcacatcctcaacatttcaactgttgtcaaactttccttctcttgttatccttgacctttcctataataatatgacatcatcagtctttcaaggtggtttcaacttcagttcaaaacttcaaaatcttgatttgcaaaattgtagtcttacggatggaagttttcttatgtcatcttctttcattatgcgttcttcatcttctcttgtttcccttgatctctcctcaaatctgttgaaatcatcaactatattttactggctctttaactccaccaccaatcttcataaccttgtccttgattataacatgttagaaggtaccattccagatggatttgggaaagtaatgaactctcttgaagttcttgacctctacggtaacaaactgcaaggcgagattccatctttctttggtaaaatgtgcgcattgcaggggttacggctctcaaataacaagttgaacggggaattctctagcttcttccgaaattcttcatggtgcaacagagacatatttacgaggttggatttatcttataaccggttgactggcatgttacctaaaagcattggtttgctatcagagttggagcttcttttcttggatgggaattctttggagggtgacgtcactgaatcccatctttctaatttttccaaattaaaattcttgtccctatcagagaactcgttgtctctgaaattagtcccgagttgggttcctccattccaattagaaaaattggaactcagttcttgcaagttgggccccacttttcctagttggctcaagactcaaagttctttgttttggcttgatatttctgataacgggattaatgactctgtaccagactggttttggaataacttgcaaaatatgatgttattaaatatgtctcacaattatatcattagtgcaattcctaatatatccttgaagcttcctttcagaccatttatacatctgaaatcgaatcagtttgagggtaaaattccgtcatttttactacaagcttcccatctgattctctctgaaaataatttttcagatttgttttcattcttatgtgaccaaagcacagcttcaaatttggccactttagatttatcacgcaatcaaataaaggggcaactgccagattgttggaaatcagtaaagcaattactgttccttgatttaagcagcaacaaattgtcagggaagattcctatgtccatgggcgcccttgttaatatggaagccttggttttacgaaacaatggtttaatgggtgagttgccttcttctttgaagaattgcagcactttatttatgctggacctgagtgaaaatatgttgtcgggtccaataccatcatggattggagaaagtatgcagcaattgataatcttgaacatgcgaggaaatcacttctcaggaaatctacccattcatctctgttatttgaaccgtattcaattgttggatctttcaaggaataatttgtcaagaggaattccatcatgcttaaagaatttcactgcaatgtctgaacagagcatcaactcaagtgacactctgtctcgtatatattggcataataagacttaccatgatatttatggtcttcacttattcggaggttatacgcttgacataacatggatgtggaaaggtgtggaacaggggttcaagaatccagagttacagctcaaaagcattgatctttccagtaacaatttaaccggtgaaataccaaaggaggtcggatatttgcttgggttagtttctttgaatctatcaagaaacaatttgagtggagaaattccttctcggattgggaatttaaggtcactagaatcacttgacttgtcaagaaatcacatctctgggagaattccttcttctctttctgaaattgatgatttgggaaaattagacttgtcacacaactctctttctggaagaatcccatcaggaagacattttgaaacctttgaagcctccttttttgaaggaaacactgatctttgtggccaacaacttaacaaaacttgtcctggggatggagaacagacaacagcagagcatcaagaaccaccagtcaaaggtgatgattcagttttctatgagggattatacatcagcttggggattggatacttcactggattttggggcttattagggccattgctactgtggcgtccttggagaattgcttacatcaggtttctgaacagattaacagactatgtatatgtatgcttattgtgaatgtgggaattgttgctgatcgctccaaggcaaaaagatgtgctgcaggcttctgatcagagaagaaaccattgttggcagctacaaatgcgagataatttctttaatataggagtttacaatgttttgtatttaagtaatgaactgcaaaatcttgtttccagaaacttagtatgctattgttgtatttattgtataatatatttgtaatgctgtttgttt

SEQ ID NO: 658 - DNA, 4843 bp, Glycine max
acttaccaagatatctatgtgctgtgagtctccaactaaacataatcattcacacactaaccagtactcatcattaaattcttcgagtatacgtccattaaaaattaaacacgcgagaccatgcaaccaataacaacattgtcctacagtttccatgtatctggcaaccattatcgttcaactcttcactcttcttgtgtccaagtaatcatttcacatcccacaacgttgtcttccaacaacaacaagagaaagaagaagaaaacttcaatttttgacagccaagtttgtttccagtaacgacggacaacaacctttcacttttactatgatgagagaaaaccacgtctgaagagtttgagcagcaaagagaacttagaatgatggaggatttttggagcatgttttgtggggatcgtgattgtcctgggacccggggaaagactttttgccatgatttaaagtttttgaaagatccttctacatgcattaaccagttcttgatcatttgcgttgatgtgctactactggtcatgttgggattcattttgatccagaagtctttgttcagaccatttcgtggtcagttttgcgtggaaagatattcaaacttgcagctaatttctgccgttaccaatggctctctggggttgttgcatttgtgcttagccatttgggttttagagaacataaggaagagctacactctttttccacttaatgggtgggtgctagaactttttcatggattcagatggttcttagttggcttaagtggttccttagtaggatgtctttttggtggttgaatccattgatgaaaaggggtcaagagaaaacacttcaggatgaggatattccaaagttaagagaatcagatcgagcaggaagttgctatttatcgtttgtagaacaattgagcagacaaaaaggaaaagaaaaattttcacagtcgttagttttgtggactttaattttgtgccacaagagagagattttgatgtcaggattgtttgcattactcaaggtactcaccttatctactggccctgtacttctgaatgcttttatattggtttctgagggtaatggaagtttcaaatacgagggttatgtattggtggtatcacttttcgttataaagatcatagagtccctatcacaaaggcagtggtatttccgcactaggcttgttgggatgaaagttaggtcagtacttacagcagctatttataaaaaattattgaggttatcgagttcagctagattgaatcactctggtggtgaggtaatgaattatgtgactgtggattcttatagaattggagaattcccattttggtttcatcagacgtggacacaagcctccaactctgtattgcattagtaatactttttcatgctattggcctagcaacaattgcctcattggtggtgatagttctcactgtgctttgcaatactccactagcaaagttgcagcacaagtttcagagcgaactcatggtggcacaagataagagactgaaggccacttctgaggctcttgtgaatatgaaagtgctgaagttatatgcatgggaaacccattttaaaaatgctatagaaatactaagaattttggaactaaaattgttaggtgccgtgcaagtgagaaaggcatataatatctttctattttggacctcacctgttttggtctctgctgcttcttttggggcatgctacttcttgaaaattcctttacatgcaaataatgttttcacttttgtggcaactttgcgccttgtgcaagaaccaattacagccatcccagatgttgttggggtggtcattcaagcaaaagtggcttttgcccggattgttaaattccttgaggcatctgaattgcatagtgcaaatttcagaaataggtcttttgatgatagtattagaggcccaatttcaatcaaatctgctgactgttcatgggaaggtaatgtatcaaaagcaacactgaggcacataaacttggagatcagacatggtcaaaagttggcaatttgtggagaagttggctcaggcaaatcaaccctcttagctacaattcttggagaagttcctatgacaaaaggaacgattgaagtttatggaaagttttcatatgtttctcaaacaccatggatacaaacaggtactatacgggaaaatattttatttggatctgatttggatgctcaaagatatcaagaaacacttcgtagatcttcactattgaaggacctcgagctgtttccccatggagatctcactgaaataggtgagaggggagttaacttgagtggaggtcagaagcagcgaattcaacttgcacgtgcactttatcagaatgctgatgtatatctgctggatgatccattcagtgctgttgatgcacatactgcaacaaatttgtttaatgaatacatcatggatggtcttaaagagaaaactgttttacttgtaactcatcaagttgactttctaccagcatttgattctgttttgttgatgtcaaatggggaaatccttgaagcttctccatatcatcatttgttgtcctcaaaccaagaattccaagatcttgttaatgctcacaaggaaactgcaggttctgacaagcctatgcatgttacttctacccagagacactcaacttctgccagagagattacacaagcttttgtggagaacttcaaagccacaaatgggaatcagttgataaagagagaagagagagagataggagacacggggttgaagccttacttacagtatttgaaccaaacgaaaggatacatatacttttttttggcttctcttagtcacctcatgtttgtcatttgccagatattgcaaaactcatggatggctgctaatgttgacaatttccaagtcagcactttgcggttgattgtagtttacttcttaattggggctatttctacaattttcttgttgaccagaactctacttgtagtttacatgggtattcagtcatcaacatatttattttttcagttaatgaactccctttttcgtgcaccaatgtccttttatgactctacaccattgggaaggatacttagtagagtctcatcagatctaagcattgtggatcttgatataccctttattctcagtttcactgtggtaggtgttatatacttctattctaatctggcagtcctagctattatttcttggcaagtcttggttatcgccataccaatggtatatctttcaattcgcctgcagagatactacttttccactgcaaaagaagtgatgcgcgtgaatggcacaacaaaatcctttgtagctaatcatatagctgaaactactgctggagttgtgacaataagagcctttgaagaagaagatcgtttctttgagaagaatcttgatctaattgacagcaatgctagtcctttcttccatagttttagctcaaatgagtggctgatccaaagattagaaatagttagtgcagtactgctttcctccgcagcactatgcatggttatgcttccaccagagactttcagctctggatttcttggcttgtctctctcttatggctttacactaaatgcttccttacaatttttaattcaaagccaatgcagtctagaaaattacataatatctgtagagaggctaaatcaatatatgcatatacctggtgaggcccaagaagtaatagaaggaaatcgtcctccctcgaattggccagttgctggtaaagtagaactaaatgacttgcagatacgatacaggcctgatggaccacttgtacttcatggaatcacatgcacattcaaagcagggcacaagattggaattgttggcaggacaggcagtgggaagtccactcttataggcgctttatttcgtcttgtggagccagcaggtggaaaaattgtagtcgatggcgtagatatatcttctattggtcttcatgatttgaggtcacgttttggtgttatacctcaggatcctaccctttttaatgggactgttagatataatttggaccctttatctcaacactctgatcacgagatatgggaggttcttgggaagtgtcaattgcgagaagctgtccaagagaaagaagagggcctgaactccccagttgttgaagatggatcaaactggagcatgggacaaaggcaattattttgtttggggcgtgttcttttaaggagaagtaggatattggtgctggatgaagcaactgcatcaattgacaatgcaactgatttgattctgcagaagaccattaggactgagtttgcagattgtacagtgatcacagtagcacacaggataccaaccgtgatggattgcactatggttctttcaatcagagatggaaaattggtggagtatgatgatccaatgtgcctgatgaagaaagaaggatcgctattcaatcagcttgttaatgaatactggtctcattttcaatctgcagaatcacattgatactgcaaaatgtttattttcttttgtcgacattgttatccatctttctttggtattagctacaagtcaatatgtgaggcttgaggagttcggaaggaattggatgaatgaaaagaaacggtgcatgagtatttgaatgtgttgtattagagtttatttgttatgagctgcattgaatggtttttttttattattattttgtctttggagaggtgaagtccttactaaataataaagagtttaactgatgtaattcatcctccaaaataactgtcacttctgacaaaaaaacaattatcccaaaataagtattacatttgatattttaatgtaa

SEQ ID NO: 659 - DNA, 4446 bp, Glycine max
atggaggatttttggagcatgttttgcggagaatctgattgtcctggaaccggaggaaagccacctttctgttatgatttcaagtttttgaaagatccttctacatgcaccaaccagttcttgatcatttgctttgatttgctactactgatcatgctggcattcattttgatccagaattctttgttcagaccatttcggggtcatcagtttgggctggcaagattttcaaacttgcagctaatttctgccataatcaatggatctttggggttgttgcatttgtgcttaggcatttgggttttagaggagaagttaaggaagagtctcactcttattcctcttgatttgtggttgctcgaactttttcaaggattcagatggttgttagtaggcttgagtgtaagtcttcagtttaaacagcttccaaggtcatggttgtggttgttttctcttcttacattatttttttctactgttttctgtgttctatccatgtcctatgcaataagtagcagagaattgtcctttaaggaagctttaggtgttctgtcttttccagggtcagttttactactcttgtgcacttataaagcgtataaatgtgaagacactgacggggaaattgatgaaggcctttatgaccctttaaatggtcactttaatgaagttgatcctgataactacgtaactccttttgccaaagctggattctttagtaggatgtcgttttggtggttgaatccattgatgaaaaggggcaaagagaaaacacttcaggacaaggatatcccaaagttgcgtgaatcagatcgagcagaaagttgctatttgtcatttttagaacaattgaacagagaaaagggaaaagaaccattatcacaatcatcagttttgtggactattgttttctgccacaggagagagattttgatgactggattgtttgcattgctcaaggtactcaccttgtctactggtcctgtacttctgaatgcatttatattggtttctgagggtaatgaaagtttcaaatatgagggttatgtattggtcatatcacttttcattataaagatcatagagtctctgtcacaaaggcagtggtatttccgcagtaggcttgttgggatgaaagttaggtcactacttacagcagcaatttataaaaaactattgaggttatctagtgcagctagattgacacattctggtggtgagataatgaattatgtgactgtggatgcttatagaattggagaattcccatattggtttcaccagtcgtggacgacaagccttcaaatatgtattgcattgttgatactttttaatgctattggggtggcaacaattgcctcattggtggtgatagttctcacagtgctttgcaatgctccactggcaaagttgcagcataagtttcagagtgaactcatggtggcacaagatgagagattgaaggccagtactgaggctcttacgaatatgaaagtcctgaagctgtatgcatgggaaacccattttaaaaatgctatagaaagactaagaaatttggaactgaaattgctaagttccgtgcaattgagaaaggcatacaacatctttctattttggacctcacctattttggtctctgctgcttcttttggaacatgttacttcttgaacattcctttgcgtgcaaataaccttttcacatttgtggcaactatacgccttgtgcaggagccaattacagccatcccagatgttattggggtggtcattcaagcaaaagtggcatttgcccggatcgttaaattccttgaggcacctgaattgcaaagtgaaaatttccggaatagaagttttgatgaaagtaataaaagcccaatttcaatcaaatctgctgacttttcatgggaaggtaatgcatcaaagtccacactgaggaacataaacttggagattagacacgggcaaaagttggctatttgtggagaagttggctcaggaaaatcaaccctcttagctacaattcttggagaagttccaatgataaagggaactattgaagtttatggaaagtttgcgtatgtttctcaaacagcatggatacagactggtactatacaggaaaatattttgtttggatctgatttggatgctcatagatatcaagaaacacttcgtagatcttcgctactgaaggacctggagctgtttccccatggagatctcactgaaataggtgagaggggagttaacttgagtggaggtcagaagcagcgaattcaacttgctcgtgcactttatcagaatgctgatgtatatctcttggatgatccatttagtgctgttgatgcacatactgccactaatctgtttaatgaatacatcatggatggtcttaaagagaaaactgttttactcgtaactcatcaagttgactttcttccagcgtttgattctgttttgttgatgtcaaatgggaaaatcctagaagctgctccttatcatcatttgttgtcctcaagccaagaattccaagatcttgttaatgctcacaagaaaactgccggttctgacaagcctatgaatgttacttcttccaagagacgttcgacatctgttagagagattacacaagctttcaaggagaaacatttaaaagaagcaaatggagatcagttaataaaggaagaagagagagagataggagacacagggttgaagccttacatgcagtatttgaatcagacgaaaggctacatatacttctttgtggcttctctttgtcatctcttgtttgtcatttgccagatattgcaaaactcatggatggctgctaatgttgacaattcccaagtcagcacattgaggttgattgtagtttacttcttgatcggggctatttctacaatattcttgttgatcagaactctacttattgttgccttgggtattcaatcatcaacaaatttatttttactgttaatgaactccctttttcgtgctccgatgtccttttatgactctacaccattgggaaggatacttagtagagtctcatcagatctaagcattatggatcttgatgtcccatttatcatcgcttatactgtgggaggtactacaaacttctattctaatctcgcagttttagcaattatcacttggcaaatcttgcttgtctgtgtaccaatggtttacattacaatacgcttgcagaggtactatttttccactgcaaaagaagtgatgcgcatgaatggcacaacaaaatccatcgtagctaatcatgtagctgaaactactgctggagttgtgacaataagagcctttgaagaagaagatcgtttctttgagaagaatcttgatctaattgacatcaatgctagtcctttcttccatagttttgcctcaaatgagtggctgatccaaagattagaaataattagtgcaatacttctttcttccacagcactatgcatggttatgcttccacccgggactttcagctctggattcattggcatggctctctcttatggtctttcactaaatgctcagctagtattttcaattcaaagtcaatgcaatcttgcaaattacataatctctgtagagaggctaaatcaatatatgcatataccaagtgaggccaaagaagtaattgaaggaaatcgtcctccttcaaattggccagttgctggtaaagtagagctaaatgacttgaagatacgatacaggctcgatggaccacttatactccatggaatcacatgcacattcaaagcaggacacaagattggaattgttggaaggacaggcagtggaaagtccactcttatcagtgctttatttcgtctagtggagccggcaggtggaaaaattgtagtcgatggcgtagacatatcttctatcggccttcatgatttgaggtcacgttttggtgttatacctcaggatcctaccctttttaatgggactgttaggtataatttggaccctttagctcaacactctgatcacgagatatgggaggttcttgggaagtgtcagttgcgagaagccgtccaagagaaacaagagggcctgaactcctcagttgttgaagatggatcaaactggagcatgggacaaaggcaattgttttgtttggggcgtgctcttttaaggagaagtaggatattggtgctggatgaagcaactgcatcaattgacaatgcaactgatttgattctgcagaaaaccattaggactgagtttgcagattgcacagtgatcacagtagcacacaggataccaaccgtgatggattgcactatggttctctcaatcagcgatggaaagttggtggagtatgatgaaccaacgagcttgatgaagaaagaaggatcgctattcaagcagcttgtcaaggagtactggtctcattttcaatctgcagaatcacattga

SEQ ID NO: 660 - DNA, 5224 bp, Glycine max
tattttttttaaaatcattgtccttagaatactaattaattttattttattttattatgtttatcaaaatgagttaaaactccatgtaaaatttacttttctttgtccaccaccaatcacattctaactactacaatgtcacagtagaatccaacaatatgaaggggtattctgtactttttttattcacacgcttttcttacttctttgcttctaattgctgtctgaccctcttatgtaccaaatgttttttggggtgtaagctgaaaccaaatcttgttccacgcatggataaatctattagaagtagttattagttgatttatagaggcaaaaagttggtgaaaacatttgtggcaatttaaagttttccgctagctgctcctccctttatagcagagtttgagcagcaacgaatacttaagtgcaatgatggaggatttttaaagcatgttttgcggagaatctgattgtcctggaaccggacaattgcaactacttactcagaagttaaacttaattgttggaacaatcttatagtttgagcagcaacgaaaacttacaatgatggaggatttttggagcatgttttgcggagaatctgattgtcctggaaccggaggaaagccacctttctgttatgatttcaagtttttgaaagatccttctacatgcaccaaccagttcttgatcatttgctttgatttgctactactgatcatgctggcattcattttgatccagaattctttgttcagaccatttcggggtcatcagtttgggctggcaagattttcaaacttgcagctaatttctgccataatcaatggatctttggggttgttgcatttgtgcttaggcatttgggttttagaggagaagttaaggaagagtctcactcttattcctcttgatttgtggttgctcgaactttttcaaggattcagatggttgttagtaggcttgagtgtaagtcttcagtttaaacagcttccaaggtcatggttgtggttgttttctcttcttacattatttttttctactgttttctgtgttctatccatgtcctatgcaataagtagcagagaattgtcctttaaggaagctttaggtgttctgtcttttccagggtcagttttactactcttgtgcacttataaagcgtataaatgtgaagacactgacggggaaattgatgaaggcctttatgaccctttaaatggtcactttaatgaagttgatcctgataactacgtaactccttttgccaaagctggattctttagtaggatgtcgttttggtggttgaatccattgatgaaaaggggcaaagagaaaacacttcaggacaaggatatcccaaagttgcgtgaatcagatcgagcagaaagttgctatttgtcatttttagaacaattgaacagagaaaagggaaaagaaccattatcacaatcatcagttttgtggactattgttttctgccacaggagagagattttgatgactggattgtttgcattgctcaaggtactcaccttgtctactggtcctgtacttctgaatgcatttatattggtttctgagggtaatgaaagtttcaaatatgagggttatgtattggtcatatcacttttcattataaagatcatagagtctctgtcacaaaggcagtggtatttccgcagtaggcttgttgggatgaaagttaggtcactacttacagcagcaatttataaaaaactattgaggttatctagtgcagctagattgacacattctggtggtgagataatgaattatgtgactgtggatgcttatagaattggagaattcccatattggtttcaccagtcgtggacgacaagccttcaaatatgtattgcattgttgatactttttaatgctattggggtggcaacaattgcctcattggtggtgatagttctcacagtgctttgcaatgctccactggcaaagttgcagcataagtttcagagtgaactcatggtggcacaagatgagagattgaaggccagtactgaggctcttacgaatatgaaagtcctgaagctgtatgcatgggaaacccattttaaaaatgctatagaaagactaagaaatttggaactgaaattgctaagttccgtgcaattgagaaaggcatacaacatctttctattttggacctcacctattttggtctctgctgcttcttttggaacatgttacttcttgaacattcctttgcgtgcaaataaccttttcacatttgtggcaactatacgccttgtgcaggagccaattacagccatcccagatgttattggggtggtcattcaagcaaaagtggcatttgcccggatcgttaaattccttgaggcacctgaattgcaaagtgaaaatttccggaatagaagttttgatgaaagtaataaaagcccaatttcaatcaaatctgctgacttttcatgggaaggtaatgcatcaaagtccacactgaggaacataaacttggagattagacacgggcaaaagttggctatttgtggagaagttggctcaggaaaatcaaccctcttagctacaattcttggagaagttccaatgataaagggaactattgaagtttatggaaagtttgcgtatgtttctcaaacagcatggatacagactggtactatacaggaaaatattttgtttggatctgatttggatgctcatagatatcaagaaacacttcgtagatcttcgctactgaaggacctggagctgtttccccatggagatctcactgaaataggtgagaggggagttaacttgagtggaggtcagaagcagcgaattcaacttgctcgtgcactttatcagaatgctgatgtatatctcttggatgatccatttagtgctgttgatgcacatactgccactaatctgtttaatgaatacatcatggatggtcttaaagagaaaactgttttactcgtaactcatcaagttgactttcttccagcgtttgattctgttttgttgatgtcaaatgggaaaatcctagaagctgctccttatcatcatttgttgtcctcaagccaagaattccaagatcttgttaatgctcacaagaaaactgccggttctgacaagcctatgaatgttacttcttccaagagacgttcgacatctgttagagagattacacaagctttcaaggagaaacatttaaaagaagcaaatggagatcagttaataaaggaagaagagagagagataggagacacagggttgaagccttacatgcagtatttgaatcagacgaaaggctacatatacttctttgtggcttctctttgtcatctcttgtttgtcatttgccagatattgcaaaactcatggatggctgctaatgttgacaattcccaagtcagcacattgaggttgattgtagtttacttcttgatcggggctatttctacaatattcttgttgatcagaactctacttattgttgccttgggtattcaatcatcaacaaatttatttttactgttaatgaactccctttttcgtgctccgatgtccttttatgactctacaccattgggaaggatacttagtagagtctcatcagatctaagcattatggatcttgatgtcccatttatcatcgcttatactgtgggaggtactacaaacttctattctaatctcgcagttttagcaattatcacttggcaaatcttgcttgtctgtgtaccaatggtttacattacaatacgcttgcagaggtactatttttccactgcaaaagaagtgatgcgcatgaatggcacaacaaaatccatcgtagctaatcatgtagctgaaactactgctggagttgtgacaataagagcctttgaagaagaagatcgtttctttgagaagaatcttgatctaattgacatcaatgctagtcctttcttccatagttttgcctcaaatgagtggctgatccaaagattagaaataattagtgcaatacttctttcttccacagcactatgcatggttatgcttccacccgggactttcagctctggattcattggcatggctctctcttatggtctttcactaaatgctcagctagtattttcaattcaaagtcaatgcaatcttgcaaattacataatctctgtagagaggctaaatcaatatatgcatataccaagtgaggccaaagaagtaattgaaggaaatcgtcctccttcaaattggccagttgctggtaaagtagagctaaatgacttgaagatacgatacaggctcgatggaccacttatactccatggaatcacatgcacattcaaagcaggacacaagattggaattgttggaaggacaggcagtggaaagtccactcttatcagtgctttatttcgtctagtggagccggcaggtggaaaaattgtagtcgatggcgtagacatatcttctatcggccttcatgatttgaggtcacgttttggtgttatacctcaggatcctaccctttttaatgggactgttaggtataatttggaccctttagctcaacactctgatcacgagatatgggaggttcttgggaagtgtcagttgcgagaagccgtccaagagaaacaagagggcctgaactcctcagttgttgaagatggatcaaactggagcatgggacaaaggcaattgttttgtttggggcgtgctcttttaaggagaagtaggatattggtgctggatgaagcaactgcatcaattgacaatgcaactgatttgattctgcagaaaaccattaggactgagtttgcagattgcacagtgatcacagtagcacacaggataccaaccgtgatggattgcactatggttctctcaatcagcgatggaaagttggtggagtatgatgaaccaacgagcttgatgaagaaagaaggatcgctattcaagcagcttgtcaaggagtactggtctcattttcaatctgcagaatcacattgataatgcaaaatattttgtttttgttgctgttttatgacaacgttgttgtctatctttctttgatattagcataaaaaatgagtcaacaaagttgtgcgtggaataagaaaatgttaagaaccttgcgagttacgtttcaaaacagaatataaactagaccttgatttatgcgttttacttgctttaaatacaatactaaatttagagcaaa

SEQ ID NO: 661 - DNA, 894 bp, Glycine max
atgaaaacccttaacaaagcctcacttattttattccctctcttgttcctttccctattcaagcattcccatgctgcaggaatcgctatctactggggccaaaacggtggagaaggcaccttagcagaagcttgcaacactagaaactaccaatatgtgaacatagccttcttgtccacttttggcaacggccaaactccacaactcaaccttgcaggtcattgtgaccccaacaacaatggctgcactgggttgagcagtgacatcaaaacttgccaagaccttggcatcaaagtgttgctctcccttggtggtggtgctggaagctactccctcagctcagctgatgatgccactcaacttgcaaactacctctggcagaatttccttggaggtcaaaccggatcagggccattaggtaatgttatattggatggcattgactttgacattgaatctggtgggagtgaccattatgatgacctagccagggcattaaatagcttcagctcacaaaggaaggtgtacttgtctgcagccccacagtgcataatccctgatgctcacttggatagagccatccaaactgggctttttgactatgtgtgggttcaattctacaacaacccttcatgccaatactccagtggaaacaccaacaatttgatcaattcatggaaccaatggatcacagtgccagcttctcaaatcttcatggggcttcctgcatctgaggcagctgctccaagtggtggctttgtgcccgctgatgtgttgacttctcaggttcttcctgtgattaaacagtcttcaaagtatggtggagtcatgctctggaacagattcaatgatgtccaaaatggttatagtaatgctattattggaagtgtttaa

SEQ ID NO: 662 - DNA, 1144 bp, Glycine max
gaaccaaaccaagaagctaagagaatacaccaaaacccaacatgaaaacccttaacaaagcctcacttattttattccctctcttgttcctttccctattcaagcattcccatgctgcaggaatcgctatctactggggccaaaacggtggagaaggcaccttagcagaagcttgcaacactagaaactaccaatatgtgaacatagccttcttgtccacttttggcaacggccaaactccacaactcaaccttgcaggtcattgtgaccccaacaacaatggctgcactgggttgagcagtgacatcaaaacttgccaagaccttggcatcaaagtgttgctctcccttggtggtggtgctggaagctactccctcagctcagctgatgatgccactcaacttgcaaactacctctggcagaatttccttggaggtcaaaccggatcagggccattaggtaatgttatattggatggcattgactttgacattgaatctggtgggagtgaccattatgatgacctagccagggcattaaatagcttcagctcacaaaggaaggtgtacttgtctgcagccccacagtgcataatccctgatgctcacttggatagagccatccaaactgggctttttgactatgtgtgggttcaattctacaacaacccttcatgccaatactccagtggaaacaccaacaatttgatcaattcatggaaccaatggatcacagtgccagcttctcaaatcttcatggggcttcctgcatctgaggcagctgctccaagtggtggctttgtgcccgctgatgtgttgacttctcaggttcttcctgtgattaaacagtcttcaaagtatggtggagtcatgctctggaacagattcaatgatgtccaaaatggttatagtaatgctattattggaagtgtttaatcatgctatagacttatagaaaaactatgtcattaattccattatttaaataatactaatcaccactcgtgattggtttttctactatatatatatattcaatgtgctttgaacgctacatatgtttattgtaatatgtcacctacaagttacatatggtataattaccaaaataattaaaagttcattgcgaaatatgtcattttcaa

SEQ ID NO: 663 - DNA, 2718 bp, Glycine max
aaaaaaataagtcatttgtgaactaagtggatgactgtgatcatcctattttcatgtacaagattgtctttatgactttgtgtctataatgagaacaagatataattgatagccgatgcatatttctttgtcaacccatctcttctttttgttcactgtctaatttggatctgaattttgccagctctacttgtttctacatctatgcttaccagtgagatcatctgaattagaggcaaagctatatgttaaattttatttgatcatatctgatgtaacttctcattaataagtaaagtacaaagcgagtctaacacacctttctcagatctagcatggaaaacaacataaacattgaaattgcagaacaaggctctcctgaagttccatcactcataaggtatatatcatcaagtgatgttgcgggctttgacactgctgactctcaacctcccagcccatatgcccaaggaagtgaagaaacctcaccaagaagacaacatgatgaacctgtagtcatcaatcatcaaaggaagtattctatcagcatgccactttcttctgaacaagttcagcttcaaccactggacaacaaaacagatggtattcccatttcctcttctcaatcaggaactgctaactccaaccatccacaggcatcaaaatgttactctcaaccaatgccaaaaggctatgtgccccaagaggcagataatggagtcaaaatagataaccatcctggcatcaaagcattcaaggacaagaggtttgattcttttaaaacatggtctggaagacttgagagacaattaacaattctacgtggaaagtcacccagagcaactgcacaagatggtaacaacaactccagtagtactgataggccattacctgtggatcggtattttgatgcattggaaggtccagagttagaaactctcaggacatgagtgaatcactctgatccatgacttaccagaacatagctagaaaaactgcttatgggttaagcactcccgacgctcgctattttcattttcaagactcgttatcaattggtattagaactggttgtcaatgtctcgaaaaagactacttacagatggattcaccataaaggctatagagtgcatctgataagacatcggcgctcaggggtgctgccatgataaggcttcagaagagacagtgcttcctcaggacaagcaatggccatttcttcttcggtttcctatttcatcctttggtatatgccttggagttagcagccaagcaattctctggaaagcactggccacatctccttccactcaatttcttcacataagcctcaaagtcaacttaatcttatggttcatatcaattgctcttgttaccacagttttcaccatctatcttctaaaaatcattctctactttgaagcagttcgtcgtgagtactaccatccaatccgtgtcaacttcttctttgcaccatggatagctctcttgttcttggctcttggagttccaccatcagttaccaaagacttgctccatgttctttggtacattctaatgacaccaatattgtgtcttgaacttaagatctatggacagtggatgtctgggggccagaggaggctctctaaggtggccaatccaacaaaccatttatcaattgttggaaactttgtaggggcattacttggggcttcaatgggcctaaaagaagggcccattttcttctttgccattggcctggcccactacactgtcatgtttgtaactctctaccagagacttccaacaaatgagaccctcccaaaagagctccatcctgtgttctttctgtttgttgcagcacctagtgttgcttctatggcatgggccaatattcagggttcttttgattatggatctcgaattgcctatttcattgccctcttcctttatttttcattggctgtccggatcaattttttcagaggattcacattctctcttgcatggtgggcctatacttttccaatgactggtgcagcaattgcaaccgttagatactcaaatcgggtcacaaatccagttaccaagacactgtgtgtcatactgagtctcatctccacactcatagtaatagctttgcttgtatcaactatattgcatggctttgtcttcagaaacctcttccccaatgaccttgccattgccataagttacagaaagagaaggccacaaaagaagtggctaggtcttagatacaggagccatgattccaaagagattgaaaattacttgaagtttgtgaactcggataaaattgatttagaagcttctgccccactaccaaatggcacagaagatactccatctatctgaggatatttgctgttatagtaatgtgtcctttgaaagacacagaaatttagttatgagttgcttgcctaataatctttattagtcacacatgtgaggaacaaaagtaggagtttgactgttccagtgaccatgtatctgtagaatataaaggtttgtgtaggaagagcagtttttttttttttgtagaaacagttcccaccattatatatattttgtaaaatgagcgagttgttgtactatatgaataaataatcagaatcatagagtcaaaggaaatgaatggcaaaggatgggctttgcatatccacttagcacaaatgtggtgtcctttggatctaatcagattggaccaaacatgct

SEQ ID NO: 664 - DNA, 1662 bp, Glycine max
atgatactccagtggctgtctgggtgtgccagattctcgctgcaagaattgtacttaacaggaaatcaaatcaatggtacgcttcctgacctttcaatattttctgccttgaaaacattggatatttcagaaaatcaattacatggaaaaattccagagagtaacaaattgccatctctgttggagtctttgtcaatccgatcaaacattttagaaggtggaattccaaaatcatttgggaatgcatgtgctttgcgctcattggacatgtctaataatagcttgagtgaagagtttccaatgataatccatcacttgtctggatgtgctagatattcattggaacaattatctctaagcatgaatcaaatcaacggcacactacccgacctctcaatattctcatctttaagaggattatatctttatggaaacaagctaaatggagagattcctaaagatattaaatttccacctcaacttgaggaattagatatgcaatcaaattccttaaaggttgaaactttgtaccaattagacctttcaaataatcgtttctctgaaaaaatttcggactgttggagccatttcaagtcattatcttatttggacttaagtcacaataatttttcaggaaggatacctacatccataggatctcttcttaatcttcaagcattgctattgagaaacaacaacttaacaaatgcgatacctttctccttgaggaattgcacaaatctagtaatgctagatattgcagaaaacaaattatcagggctcatccctgcttggattgggagtgaattacaagagttgcaatttttaagtttgggaagaaataatttccatggaagtttaccattgaaattttgctacctaagtaacattctactcctggatctctcactaaacaacatgtctgggcaaattcctaaatgcataaaaaattttacttcaatgactcaaaagacatcttcaagagattatcatggtcattcatattttgtcaaaaccagccagttttcaggtcctcaaccatatgatttgaatgcactcttgatgtggaaaggctcagaacaaatgttcaaaaatagtgtgttactacttttagaaagcattgatctctcgagcaatcacttttctggagaaattccactggaaatagagaatttatttggattggtttcattgaatttatcaagaaaccatttgaccggaaagattccttcaaatattggaaagttaacatcacttgactttcttgatttgtcaagaaaccatctagttggttcaattcctttgagtcttactcaaattgatcgactcggcatgttagatttgtcacataacaatctatctggagagattccaactgataatcttgatctttgtggaccgccactagagaaattgtgtattgatgggaagcctgcacaggaaccaattgttaaacttcctgaagatgaaaatttgcttttcacccgtgaattttacatgagtatggcaattggatttgttataagcttttggggcgtttttggctcaatcttaataaatcgttcttggagacatgcttatttcaagttcataagcaatttctcagatgctatttatgtcatggcagccgtgaaagttttcaagtggcatcacagaggatag

SEQ ID NO: 665 - DNA, 3372 bp, Glycine max
atgccaaccattaatccagttggtttgaaattcatgcaagccataataacatttatgatgatgatgttgcaggttgtttgtgctgaagaggaaataatgtgcattgagagggagagggaagcactcctccaattcaaggatgcacttgtggatgactatggcatgctctcttcttggaccacttctgattgctgccaatggcaagggattcgctgcaccaacctcaccgcccatgttctaatgctcgaccttcatggagattttaatgatgtccagcaacgttatatgagaggagagatccacaagtcgttgatggagttgcaacaattaaactatttaaacctaaattcgaatgattttcaaggcagaggaatcccagagtttcttggttctctcaccaacttgagataccttgatctttcattttctcattttggcggaaaaattccaactcagtttggctctctttctcatttgaaatacttagatctttcttggaaccgttatatgcagggttcaatcccacgtcaacttggaaatctctcccagttgcagcatcttgatctcagctacaatttttttgaaggaagtataccgtcccaacttgggaacctttcaaatttgcagaagctttatcttggaggatcacattattatgatgatgcttatggtggtgctctcaaaattgacgatggagatcattggctgtctaatctcatttccttaacccatctttccttggtctcaatatctaatctcaacacttctcatagcttcctccaaatgattgccaagctaccaaaacttagagaactgagtttaattcattgtagcctttccgatcagtttatcctttctgtgaggccctctaaattcaatttttctagttccctttccatccttgatctttcctggaacagcttcacgtcatcaatgatattccagtggctgtccaacgtcacttccaaccttgttgagcttcaccttagttataacctcttggagggttccacatcaaaccattttggccgtgtaatgaattctcttgagcatctcgacctctcacataatatgttcaagggtgaggatttgaaatccttcgcgaatatatgcaccttacattctttatacatgccagcaaaccatttgactgaagaccttccatcaatccttcataatttgtctagtggttgtgttagacactcattacaagatttggatttgtcagataatcaaatcaccggctctttacctgacctttcagtattctcatctctaaaatcattgtttcttgatggaaatcaattaagtggaaagatacctgaaggcatcagcttaccgtttcatttggaatttctgtcaatcagctcaaactctttagaggaaaatcaattaaatgggaaaattctagagagtaccaaattgtcacctctgttggagtctttgtcaatcacttcaaacattttagaaggtggaattccaaaatcatttggaaatgcatgtgctttgcgctcattggacatgtctaataatagcttgagtgaagagtttccaatgataatccatcacttgtctggatgtgctagatattcattggaacgattaaatctaggcaagaatcaaatcaatggcacactacacgacctctcaatattctcatctttaagagaattatatcttgatggaaacaagctaaatggagagattcctaaagatattaaatttccacctcaacttgaggaactggatttgcaatcaaattccttaaagggtgtgctcactgactatcatttcgctaatatgtctaagttagacttcttggagttatctgacaactctttattggccttggcatttagtccaaattgggtaccaccgtttcagttgagctacataggattgcgatcttgcaagctaggtccagtatttcccaaatgggtggagacacaaaatcaatttagggatattgacatttcaaattctggaatagaagatatggttccaaagtggttttgggctaaattaacatttcaagaatccattttaatgaatatttcacacaataatctccatggtataattccaaattttccactaaagaatctttaccattccctaattcttggatcaaatcaatttgatggccctattccaccatttctacgaggttccctgtttcttgatttatctaaaaataaattctcagattctcgttcctttttatgtatggatggtactgttgaaaatttataccaattagacctttcaaataatcatctctctggaaaaattccagattgttggagccatttcaagtcattatcttatttggacttaagtcacaataatttttcaggaaggatacctacatccatgggatctcttcttcgtcttcaagcattgctattgagaaacaacaacttaacagatgagatacatttctccttgagtagttgcacaaatctagtaatgctagatattgcacaaaacagattatcagggcttatccctgcttgggttgggagcgaattacaagagttgcaattttttaatgacattcaactcttggatctctcacgaaacagcatgtctgggcaaattcctaaatgcataaaattttttacttcaatgactcaaaagacatcttcaagagattatcaaggtcattcatatgaggtcaatactgaaacttataagatcgtgaaatcatatgatttgaatgcactcttgacgtggaaaggttcagaacaaatgttcaaaaataatgtgttactacttctaaaaagcattgatctctcgagcaatcacttctctggagaaattccactggaaatagataatttatttggattggtttcattgaatttatcaagaaacagtttgatagggaaaattccttcaaagattggaaagctaacatcactcgaatctcttgatttgtcaagaaaccagttgattggttcaattcctccgagtcttactcaaatttatggactcggcgtgttagatttgtcacataaccatctaactggaaaaattccaaccagcacacagttacagagtttcaatgcctcgagttatgaagataatcttgatctttgtggactgccacttgagaaattgtgtattgataaggggctagcacaagaaccaaatgttgaagttcaagaggatgaatattcacttttcaatcgtgaattttacttgagtatgacatttggatttgttataagcttttgggtggtgtttggctcaatcttattcaagctttcttggagacatgcctatttcaagttcttgaacaatctatcagacaatatttatgtcaaggtcgcaatatttgttaataaaatatcgaaggtgcatggctga

SEQ ID NO: 666 - DNA, 1008 bp, Glycine max
ttactgatcttggatgtgaacagcttgtcccatggattcagtctgttccaggaaggcaagagtagtgggaatctgaagactaatgaatctaacaaggaaaattctggagaagatattactggtgcaaagaatgaaatgaagtgtgacaaccaagcacctgaaaacaagagtgagacagagaaatccaagccagtaacgaagaaagatggtgaaaatactacacccgcaaaagtgtttgagaagtgcataagaccagaggttatccctgcaaatgagataggggttacatttgcagatattggtatattgctttttgggcctcctggtactggaaaaacaatgatagcaaaggcaattgcaaatgaagctggtgcaagtttcattaatgtctcaatgtcaaccatcacatcaaaatggtttggagaggatgaaaagaatgtccgagctctgttcacactggcagctaaggttgccccaacaattatctttgttgatgaggttgacagcatgcttggacagaggactagagtaggagagcatgaggctatgaggaagattaaaaataaattcatgacacactgggatgggctattaacaggacctaatgagcaaattttggttcttgctgcaaccaacaggctatttgaccttgatgaagctatcataagacggtttgagagaaggatcttgggttgtcttccatctgttgagaacagggaaatgatcttgaagactcttttggctaaagaaaaacatgaaaacttagacttcaaagagctggcaaccatgacagaaggatatactggaagtgatcttaagaacttgtgcatcactgtggcttatcgacctgttagagagataataaagcaggaaagaatgaaggacatggaaaagaagaaaagagaagcagaaggccaaagctctgaagatgcttcaaacaataaagataaggaagaacaagagtcaggaggctgcaagttttgcatcagaaggatctataatgaatga

SEQ ID NO: 667 - DNA, 1644 bp, Glycine max
tgatgttgcaggttgttgtttctgctcaagaccatattatgtgcattgagactgagagggaagcactcctccaattcaaggctgcacttctggatccctatggcatgctctcttcttggaccacttctgattgctgccaatggcaagggattcgctgcaccaacctcaccgcccatgttctaatgctcgaccttcacggtttgaatcgttcttggagacatgcttatttcaagttcataagcaatttctcagatgctatttatgtcatggcagccgtgaaagttttcaagttgcatcacagaggatagctgaaaaattctgaattgtaggtgccagcttgttgaggtggaaaatgcaaagagacacttttaatttggaggtgagaaggcatctctcacagttggatttggagaccgagagagaattaaggaaggcttctagagctttagggagccaattgtgattgtgatccatctagtttattttcctttttaatttctaaacattttgtttgtagtttggcatgtaaatctgaactggttgttttgtatgaagttgatgaatcttcataataatgggaactgagaggtttggttattgcttcttcatttttgggtcatgctatttgattatgtagaaatagagaaccgtgtttgatctagggattttgttgtgcttttgtacattagtctcatgatttaatttaaggaattaagttatatgagattaaaaggattcattgccaaggaattgaatgtgaattactgcagcaaaaactgatcttaaacttgggcaaagatgtttggagtatgaagagctacgatgcttgccagatgggtaatgctaattgcaccctctggcagagtggtgtgagcagcggtgattggcaaagttggcactgatggaggagtggtgattgaagtgctcatcacgcttgagatacatctcatagttctgcaatttaacaaatacctcatcaaaagaggtcaaggtgttttgccaatgatgtagccttcaaggtcacgaataagcttagactgataccatatagagaatgaataagttgtttattttaaacacaatttgaatacaaggcagcaacatttataaagttgtctgttacaattagataagatagaagttttctaattttaattattaagcagtacagttgcaccatcaatttacaaaattctgattatataatacagcatacctaaaatgtttggtgtaaaatattcctacttcctacaaagccattgcatcttccaaaaccatgcatgacataatataaatcccctaatacaggtgctcatttgtttgtagacaacccaaacgaaaaccgagaacctattcccaaacatagtgcatgacgatccacacgtcctttagagaagatgtgtgtggtagaatttgtgcatttctgggaatcatgatatccctgtgacatttgggatatagtgagacatttgggcatgctttgagttcaacatctctgatgaaggactcctttctttgttaaaggtatcattgaggatgaatggtcacaaatccaaaaataaatgtagcattccataatctaaaggaagtaagtgagctgttgtttcttcctcgaacctctttcaccatacaaatcattccagt

SEQ ID NO: 668 - DNA, 1314 bp, Glycine max
atgattgccaagctaccaaaacttagagaactgagtttaagttattgtagcctttccgatcattttatcctttcattgaggccctccaaattcaacttttctagttccctttccttccttgatctttccatcaacagcttcacgtcatcaatgatactccagtggctgtccaacgtcacttccaaccttgttgagcttgaccttagtggtaacctcttggagggttccacatcaaaccattttggccgtgtaatgaattctcttgagcacctcgacctctcatataatatattcaagggtgacgatttcaaatccttcgcgaatatatgcacattacgttctttatatgcgacagaaaacaatttcagtgaagaccttccgtcaatccttcataatttgtctagtggttgtgttagacactcattacaagatttggatttgtcatataatcaaatcaccggctctttacctgacctttcagtattctcgtctctaaaaacattggttctcaaacagaatcaattaagtggaaagatacctgaaggcatccgcttaccatttcatttggaatctctgtcaatccaatcaaactctttagaaggtggaattcccaaatcatttgggaactcatgtgctttgagatcactggattggccccctcctcccccccgtgatcagttttgccaagtttggctaagtttgtgcctcggtggtggatcatcatgtcataacatggcaagacacaagggtaaaactaacctgtctcacgacggtctaaacccagctcacgttccctattggtgggtgaacaatccaacacttggtgaattctgcttcacaatgataggaagagccgacatcgaaggatcaaaaagcaacgtcgctatgaacgcttggctgccacaagccagttatccctgtggtaacttttctgacacctctagcttcaaattccgaaggactaaaggatcgataggccacgctttcacggttcgtattcgtactggaaatcagaatcaaacgagcttttacccttttgttccacacgagatttctgttctcgttgagctcatcttaggacacctgcgttatcttttaacagatgtgccgccccatccaaactccccacctgacaatgtcttccgcccagatcgaccggccgaagccgaccttgggtccaaaaagaggggcagtgccccgcttccgattcacggaataagtaaaataacgttaaaagtagtggtatttcactttcactgtttccagctcccacttatcctacacctctcaagtcatttcacaaagtcggactag

SEQ ID NO: 669 - DNA, 3450 bp, Glycine max
atgccaaccatgaatccagttcgtttcaaatacatgcaagccataataatatttatgatgttgcaggttgttgtttctgctcaagaccatattatgtgcattcagactgagagggaagcactcctccaattcaaggctgccattgaggatccctatggcatgctctcttcttggaccacttctgattgctgccaatggcaagggattcgctgctccaacctcaccgcccatgtcctaatgctcgaccttcacggtgatctgtttaatgatggacgttatatgagcggagagatccaccagtcgttgatggagttgcaacaattaaagtatttaaacctcagttggaattcttttcaaggcagaggaatcccagagtttcttggttctctcaccaacttgagataccttgatctgtcattttctcattttggcggaaaaattccaactcagtttggctctctttctcatttgaaatacttaaatcttgcttggaattctctggagggttcaatccctcgtcaacttggaaatctctcccagttgcagcatcttgatctcggggacaatcaatttgaaggaaaaataccctctcaacttgtaaatctctcccagttgcagcatcttgatctcagctacaatcaatttgaaggaaatataccctctcaaattggaaatctctcccagttgctgtatcttgatctaagtggcaattcttttgaaggaagtataccgtcccaacttgggaacctttcaaatttgcagaagctttatcttggcagatattatgatgatggtgctctcaaaattgacgatggagatcattgggtgtctaatctcatttctttaacccatctttccttggtctccatatctaatctcaacacttctcatagcttcctccaaatgattgccaagctaccaaaacttagagaactgagtttaagtgaatgtagcctttccgatcattttatcctttcattgaggccctccaaattcaacttttctagttccctttccttccttgatctttccttcaacagcttcacgtcatcaatgatactccagtggctgtccaacgtcacttccaaccttgttgagcttcaccttagtcataacctcttggagggatccacatcaaaccattttggccgtgtaatgaattctcttgagcacctcgacctctcatttaatatattcaaggctgacgatttcaaatccttcgcgaatatatgcaccttacgttctttatatgcgccagaaaacaatttcagtgaagaccttccgtcaatccttcataatttgtctagtggttgtgttagacactcattacaagatttggatttgtcatataatcaaatcaccggctctttacctgacctttcagtattctcatctctaagatcattggttctttatggaaataaattaagtggaaagatacctgaaggcatccgcttaccatttcatttggaatttctgtcaatcggatcaaactctttagaaggtggaattcccaaatcatttgggaactcatgtgctttgagatcactggatatgtctggtaacaatttgaataaagagctttcggtgataattcatcaattgtctggattctcgctacaagaattgaacttaaaaggaaatcaaatcaatggaacgcttcctgacctttcaatatactcatctttaagaggtttatatcttgatggaaacaagctaaatggagagattcctaaagatattaaatttccacctcaactggagagactagatctgcaatcaaatttcttaaagggtgtgctcactgactatcatttcgctaatatgtcaaagttagatttattggagttatctgacaactctttattggccttggcatttagccaaaattgggtcccaccatttcagttgagccacataggattgcgatcttgcaagctaggtccagcatttcccaaatggttggagacacaaaatcattttctggatattgacatttcaaatgctggaatagcagatatggttccaaaagggttttgggctaatttagcattccgagaattgatttcaatgaatatttcatacaataatctccatggtataattcctaattttccaacaaagaatattccatattccctaattcttggaccaaatcaatttgatggccctgttccaccatttctgcgaggttccgaatttcttgatttatccaaaaatcaattctcagattctctttcatttttatgtgctaatggtacagttggaactttgttcgaattagacctttcaaataatcatttctctggaaaaattccggactgttggagccatttcaagtcattaacttatttggacttaagtcacaataatttttcaggaaggatacccacatccatgggatctcttcttcatcttcaagcattgctattgagaaacaacaacttaacagatgagatacctttctccttgaggagttgcacaaatctagtaatgttagatatttcagaaaacagattatcagggcttatccctgcttggattgggagcgaattacaagagttgcaatttttaattttgggaagaaataatttccatggaagtttaccattgcaaatttgctacctaagtgacattcaactcttggatctctcactaaacaacatgtctgggcaaattcctaaatgcataaaaaattttacttcaatgactcaaaagacatcttcaagagattatcaaggtcattcatattttgtcaaaaccagccagtttccaggtcctcaaccatatgatttgaatgcactcttgacgtggaaaggttcagaacaaatgttcaaaaataatgtgttactacttctaaaaagcattgatctctcgagcaatcagttctctggagaaattccactggaaatagataatttatttggattggtttcattgaatttatcaagaaacagtttgatagggaaaattccttcaaagattggaaagctaacatcactcgaatctcttgatttgtcaagaaaccagttggttggttcaattcctccgagtcttactcaaatttatggactcggcgtgttagatttgtcacataaccatctaactggaaaaattccaaccagcacacagttacagagtttcaatgcctcgagttatgaagataatcttgatctttgtggaccgccacttgagaaattgtgtattgataagtggctagcacaagaaccaaatgttgaagttcaagaggatgaatattcacttttcaatcgtgaattttacatgagtatgacatttggatttgttataagcttttgggtggtgtttggctcaatcttattcaagcgttcttggagacatgcctatttcaagttcttgaacaatctatcagacaatatttatgtcaaggtcgcaatatttgctaataaaatatcaaaggtgcatggctga

SEQ ID NO: 670 - DNA, 3582 bp, Glycine max
taattctcatattcagtggattcatttcatcaatcactttgcctttctgatcataatcaccaaaatgccaaccatgaatccagttcgtttcaaatacatgcaagccataataatatttatgatgttgcaggttgttgtttctgctcaagaccatattatgtgcattcagactgagagggaagcactcctccaattcaaggctgccattgaggatccctatggcatgctctcttcttggaccacttctgattgctgccaatggcaagggattcgctgctccaacctcaccgcccatgtcctaatgctcgaccttcacggtgatctgtttaatgatggacgttatatgagcggagagatccaccagtcgttgatggagttgcaacaattaaagtatttaaacctcagttggaattcttttcaaggcagaggaatcccagagtttcttggttctctcaccaacttgagataccttgatctgtcattttctcattttggcggaaaaattccaactcagtttggctctctttctcatttgaaatacttaaatcttgcttggaattctctggagggttcaatccctcgtcaacttggaaatctctcccagttgcagcatcttgatctcggggacaatcaatttgaaggaaaaataccctctcaacttgtaaatctctcccagttgcagcatcttgatctcagctacaatcaatttgaaggaaatataccctctcaaattggaaatctctcccagttgctgtatcttgatctaagtggcaattcttttgaaggaagtataccgtcccaacttgggaacctttcaaatttgcagaagctttatcttggcagatattatgatgatggtgctctcaaaattgacgatggagatcattgggtgtctaatctcatttctttaacccatctttccttggtctccatatctaatctcaacacttctcatagcttcctccaaatgattgccaagctaccaaaacttagagaactgagtttaagtgaatgtagcctttccgatcattttatcctttcattgaggccctccaaattcaacttttctagttccctttccttccttgatctttccttcaacagcttcacgtcatcaatgatactccagtggctgtccaacgtcacttccaaccttgttgagcttcaccttagtcataacctcttggagggatccacatcaaaccattttggccgtgtaatgaattctcttgagcacctcgacctctcatttaatatattcaaggctgacgatttcaaatccttcgcgaatatatgcaccttacgttctttatatgcgccagaaaacaatttcagtgaagaccttccgtcaatccttcataatttgtctagtggttgtgttagacactcattacaagatttggatttgtcatataatcaaatcaccggctctttacctgacctttcagtattctcatctctaagatcattggttctttatggaaataaattaagtggaaagatacctgaaggcatccgcttaccatttcatttggaatttctgtcaatcggatcaaactctttagaaggtggaattcccaaatcatttgggaactcatgtgctttgagatcactggatatgtctggtaacaatttgaataaagagctttcggtgataattcatcaattgtctggattctcgctacaagaattgaacttaaaaggaaatcaaatcaatggaacgcttcctgacctttcaatatactcatctttaagaggtttatatcttgatggaaacaagctaaatggagagattcctaaagatattaaatttccacctcaactggagagactagatctgcaatcaaatttcttaaagggtgtgctcactgactatcatttcgctaatatgtcaaagttagatttattggagttatctgacaactctttattggccttggcatttagccaaaattgggtcccaccatttcagttgagccacataggattgcgatcttgcaagctaggtccagcatttcccaaatggttggagacacaaaatcattttctggatattgacatttcaaatgctggaatagcagatatggttccaaaagggttttgggctaatttagcattccgagaattgatttcaatgaatatttcatacaataatctccatggtataattcctaattttccaacaaagaatattccatattccctaattcttggaccaaatcaatttgatggccctgttccaccatttctgcgaggttccgaatttcttgatttatccaaaaatcaattctcagattctctttcatttttatgtgctaatggtacagttggaactttgttcgaattagacctttcaaataatcatttctctggaaaaattccggactgttggagccatttcaagtcattaacttatttggacttaagtcacaataatttttcaggaaggatacccacatccatgggatctcttcttcatcttcaagcattgctattgagaaacaacaacttaacagatgagatacctttctccttgaggagttgcacaaatctagtaatgttagatatttcagaaaacagattatcagggcttatccctgcttggattgggagcgaattacaagagttgcaatttttaattttgggaagaaataatttccatggaagtttaccattgcaaatttgctacctaagtgacattcaactcttggatctctcactaaacaacatgtctgggcaaattcctaaatgcataaaaaattttacttcaatgactcaaaagacatcttcaagagattatcaaggtcattcatattttgtcaaaaccagccagtttccaggtcctcaaccatatgatttgaatgcactcttgacgtggaaaggttcagaacaaatgttcaaaaataatgtgttactacttctaaaaagcattgatctctcgagcaatcagttctctggagaaattccactggaaatagataatttatttggattggtttcattgaatttatcaagaaacagtttgatagggaaaattccttcaaagattggaaagctaacatcactcgaatctcttgatttgtcaagaaaccagttggttggttcaattcctccgagtcttactcaaatttatggactcggcgtgttagatttgtcacataaccatctaactggaaaaattccaaccagcacacagttacagagtttcaatgcctcgagttatgaagataatcttgatctttgtggaccgccacttgagaaattgtgtattgataagtggctagcacaagaaccaaatgttgaagttcaagaggatgaatattcacttttcaatcgtgaattttacatgagtatgacatttggatttgttataagcttttgggtggtgtttggctcaatcttattcaagcgttcttggagacatgcctatttcaagttcttgaacaatctatcagacaatatttatgtcaaggtcgcaatatttgctaataaaatatcaaaggtgcatggctgaagcttaacagtccctcaaagacactagccctcctggatgactccaatgtctaagcttgttaatgcttg

SEQ ID NO: 671 - DNA, 3186 bp, Glycine max
atggagttgcaacaattaaactatttaaacctcagttcgaattcttttcaaggcagaggaatcccagagtttcttggttctctcaccaacttgagataccttgatctgtcattttctcattttggcggaaaaattccaactcagtttggctctctttctcatttgaaatacttaaatcttgctgggaattattatctggagggttcaatcccacgtcaacttggaaatctctcccagttgcagcatcttgatctcagggccaatcaatttgaaggaaatataccctctcaaattggaaatctctcccagttgcagcatcttgatctcagctacaattcttttgaaggaagtataccgtcccaacttgggaacctttcaaatttgcagaagctttatcttggaggtcgtgctctcaaaattgacgatggagatcattggctgtctaatctcatttccttaacccatctttccttcgactccatatctaatctcaacacttctcatagcttcctccaaatgattgccaagctaccaaaacttagagaactgagtttaattcattgtagcctttccgatcattttatcctttcattgaggccctccaaattcaatttttctagttccctttccgtccttgatctttcctggaacagcttcacgtcatcaatgatactccagtggctgtccaacgtcacttccaaccttgttgagcttgaccttagtcataacctcttggagggttccacatcaaaccattttggccgtgtaatgaattctcttgagcacctcgacctctcatataatatattcaaggtattctcatctctaagatcattgtttcttgatggaaataaattaagtggaaagatacctgaaggcatccgcttaccgtttcatttgaaatctctgtcaatccaatacaactctttagaaggtggaattcccaaatcatttgggaactcatgtgctttgagctcactggatatgtctgctaacaatttgaataaagagctttcggtgataattcatcaattgtctgggtgtgccagattctcgctgcaagaattgaacatagaagcaaatcaaatcaatggtacgctttctgacctttcaatattctctgccttgaaaacattggatctttcaataaatcaattaaatggaaaaattccagagagtaccaaattgccatctctgttagaatctttgtcaattggatcaaactctttagaaggcggaattccaaaatcatttggggatgcatgtgctttgcgctcgttggacatgtcttataatagcttgagtgaagaatttccaatgataatccatcacttgtctggatgtgctagatattcattggaacaattatctctaagcatgaaccaaatcaacggcacactacccgacctctcaatattctcatctttaagagaattatatctttatggaaacaagctaaatggagagattcctaaagatattaaatttccacctcaactggagcaactagatatgcaatcaaattccttaaagggtgtgctcactgactatcattttgctaatatgtctaagttagacatcctggagttatctgagaactctttattggccttggcatttagccaaaattgggtcccaccatttcaattgagctacttaggattgcgatcttgcaagctaggtccagtatttcccaaatggttggagacacaaaatcaatttcgggatattgacatttcaaatgctggaatagcagatatggttccaaagtggttttgggctaatttagcattccgagaatttatttcaatgaatatttcatacaataatctccatggtataattcctaattttccaacaaagaatattcaatattccctaattcttggaccaaatcaatttgatggccctgttccaccatttctgcgaggttccgtatttcttgatttatccaaaaatcaattctcagattctctttcatttttatgtgctaatggtacagttgaaactttgtacgaattagacctttcaaataatcatttctctggaaaaattccggactgttggagccatttcaagccattaacttatttggacttaagtcacaataatttttcaggaaggatacccacatccatgggatctcttcttcatcttcaagcattgctattgagaaacaacaacttaacagatgagatacctttctccttgaggaattgcacaaatctagtaatgctagatatttcagaaaacagattatcagggcttatccctgcttggatagggagcgaattacaagagttgcaatttttaagtttgggaagaaataatttccatggaagtttaccattgcaaatttgctacctaagtgacattcaactcttggatgtctcactaaacagcatgtctgggcagattcctaaatgcatcaaaaattttacttcaatgactcaaaagacatcttcaagagattatcaaggtcattcatatcttgtcaatatcattggcatgtctggtagttatacatatgatttgaatgcactcttgatgtggaaaggttcagaacaaatgttcaaaaataatgtgttactacttttaaaaagcattgatctctcaagcaatcacttttctggagaaattccactggaaatagagaatttatttggattggtttcattgaatttatcaagaaaccatttgaccggaaagattccttcaaatattggaaagttaacatcacttgactttcttgatttgtcaagaaaccatctagttggttcaattcctttgagtcttactcaaattgatcgactgggcatgttagatttgtcacataacaatctatctggagaaattccaactggtacacaattacagagtttcaatgcctcatgttatgaagataatcttgatctttgtggaccgccactggagaaattgtgtattgatgggaagcctgcacaggaaccaattgttaaacttcctgaagatgaaaatttgcttttcacccgtgaattttacatgagtatggcaattggatttgttataagcttttggggcgtttttggctcaatcttaataaatcgttcttggagacatgcttatttcaagttcataagcaatttctcagatgctatttatgtcatggcagccgtgaaagttttcaagtggcatcacagaggatag

SEQ ID NO: 672 - DNA, 3186 bp, Glycine max; identical to SEQ ID NO: 671

SEQ ID NO: 673 - DNA, 545 bp, Glycine max
caagtttcattaatgtctcaatgtcaaccatcacatcaaaatggtttggagaggatgaaaagaatgtccgagctctgttcacactggcagctaaggttgccccaacaattatctttgttgacgaggttgacagcatgcttggacagaggactagagtaggagagcatgaggctatgaggaagattaaaaatgaattcatgacacactgggatgggctattaacaggacctaatgagcaaattttggttcttgcagcaaccaacaggccatttgaccttgatgaagctatcataagacggtttgagagaaggatcttggttggtcttccatctgttgagaacagggaaatgatcttgaagactcttttggctaaagaaaaacatgaaaacttagacttcaaagagctggcaaccatgacagaaggatatactggaagtgatcttaagaatttgtgcatcactgcggcttatcgacctgttagagagctaatacagcaggagagaatgaaggacattgatacggatttcaccagggggtacgaatga

SEQ ID NO: 674 - DNA, 3663 bp, Glycine max
atgccaaccatgaatccagttcgtttcaaatacatgcaagccataataatatttatgatgttgcaggttgttgtttctgctcaagaccatattatgtgcattcagactgagagggaagcactcctccaattcaaggctgcacttctggatccctatggcatgctctcttcttggaccacttctgattgctgccaatggcaagggattcgctgcactaacctcaccgcccatgttctaatgctcgaccttcacggtggtgagtttaattatatgagcggagagatccacaagtcgttgatggagttgcaacaattaaagtatttaaacctcagttggaattcttttcaaggcagaggaatcccagagtttcttggttctctcaccaacttgagataccttgatctggaatattgtcgttttggcggaaaaattccaactcagtttggctctctttctcatttgaaatacttaaatcttgctttgaattctctggagggttcaatccctcgtcaacttggaaatctctcccagttgcagcatcttgatctcagcgccaatcattttgaaggaaatataccctctcaaattggaaatctctcccagttgctgcatcttgatctcagctacaattcttttgaaggaagtataccgtcccaacttgggaacctttcaaatttgcagaagctttatcttggaggcggtgctctcaaaattgacgatggagatcataggctgtctaatctcatttctttaacccatctttccgtgttacagatgcctaatctcaacacttctcatagcttcctccaaatgattgccaagctaccaaaacttagagaactgagtttaagtgaatgtagccttcccgatcagtttatccttccattgaggccctctaaattcaatttttctagttccctttccgtccttgatctttccttcaacagcctcacgtcatcaatgatactccagtggctgtccaacgtcacttccaaccttgttgagcttgaccttagttataacctcttggagggttccacatcaaaccattttggccgtgtaatgaattctcttgagcacctcgacctctcatataatatattcaaggctgacgatttcaaatccttcgcgaatatatgcaccttacattctttatacatgccagcaaaccatttgactgaagaccttccatcaatccttcataatttgtctagtggttgtgttaaacactcattacaagatttggatttgtcagataatcaaatcactggctctttacccgacctttcagtattctcatctctaaaatcattgtttcttgatcaaaatcaattaaggggaaagatacctgaaggcatccgcttaccgtttcatttggaatctctgtcaatccaatcaaactctttagaaggtggaattcccaaatcatttgggaactcatgtgctttgagatcactggatatgtctggtaacaatttgaataaagagctttcggtgataattcatcaattgtctgggtgtgccagattctcgctgcaagaattgaacataggaggaaatcaaatcaatggtacgctttctgacctttcaatattctctgccttgaaaacattgggtctttcacgaaatcaattaaatggaaaaattccagagagtaccaaattgccatctctgttagagtctttgtcaattggatcaaactctttagaaggtggaattcacaaatcatttggggatgcatgtgctttgcgctcattgcacatgcctaataatagcttgagtgaagagtttccaatgataatccatcacttgtctggatgtgctagatattcattggaacgattatatctaagcatgaatcaaatcaatggtacgcttcctgacctttcaatattctcatctttaagaggattatatcttgagggaaacaagctaaatggagagattcctaaagatattaaatttccacctcaactggagagactagatatgcaatcaaattccttgaagggtgtgctcactgactatcatttcgctaatatgtctaagttagaccacttggagttatctgacaactctttagtgaccttggcatttagccaaaattgggtcccaccatttcagttgcgcttcataggattgcgatcttgcaagctaggtccagtatttcccaaatggttggagacacaaaatcaatttcagggtattgacatttcaaatgctggaatagcagatatggttccaaagtggttttgggctaatttagcattccgagaattgatttcaatgaatatttcatacaataatctccatggtataattccaaattttccaataaggaatattcaacattccctaattcttggatcaaatcaatttgatggccctgttccaccatttctgcgaggtttcgtatttcttgatttatccaaaaataaattctcagattctctttcatttttatgtgtgaatgttaaagttgaaactttgtacgaattagacctttcaaataatcatttctctggaaaaattccggactgttggagccatttcaagtcattaacttatttggacttaagtcacaataatttttcaggaaggatacccacatccatgggatctcttcttcatcttcaagcattgctattgagaaacaacaacttaacagatgagatacctatctccttgaggagttgtacaaatctagtaatgctagatatttcagaaaacagattatcagggcttatccctgcttggattgggagcgaattacaagagttgcaatttttaagtttgggaagaaataatttccatggaagtttaccattgcaaatttgctacctaagtgacattcaactcttggatgtgtcactaaaccgcatgtctgggcaaattcctaaatgcataaaaaattttacttcaatgactcaaaagacatcttcaagagattatcaaggtcattcatatcttgtcaataccattggcatttattattattatacatatgatttgaatgcactcttgatgtggaaaggttcagaacaaatgttcaaaaataatgtgttactacttttaaaaagcattgatctctcaagcaatcacttttctggagaaattccactggaaatagaggatttatttggattggtttcattgaatttatcaagaaaccatttgaccggagcgattccttcaaatattggaaagttaacattacttgactttcttgatttgtcaagaaaccatctaattggttcaattccatggagtcttactcaaattgatcgactcggcgtgttagatttgtcacataacaatctatctggagaaattccaactggtacacaattacagagtttcaatgcctcatgttatgaagataatcttgatctttgtggaccgccactagagaaattgtgtattgatgggaagcctgcacaggaaccaattgttaaacttcctgaagatgaaaatttgcttttcacccgtgaattttacatgagtatggcaattggatttgttataagcttttggggcgtttttggctcaatcttaatgaatcgttcttggagacatgcttatttcaagttcataagcaatttatcagacgctatttatgtcatggtagcagtgaaagttttcaagtggcgtcacagacgatag

SEQ ID NO: 675 - DNA, 4132 bp, Glycine max
taattctcatattcagtggattcatttcatcaatcactttgcctttctgatcataatcaccaaaatgccaaccatgaatccagttcgtttcaaatacatgcaagccataataatatttatgatgttgcaggttgttgtttctgctcaagaccatattatgtgcattcagactgagagggaagcactcctccaattcaaggctgcacttctggatccctatggcatgctctcttcttggaccacttctgattgctgccaatggcaagggattcgctgcactaacctcaccgcccatgttctaatgctcgaccttcacggtggtgagtttaattatatgagcggagagatccacaagtcgttgatggagttgcaacaattaaagtatttaaacctcagttggaattcttttcaaggcagaggaatcccagagtttcttggttctctcaccaacttgagataccttgatctggaatattgtcgttttggcggaaaaattccaactcagtttggctctctttctcatttgaaatacttaaatcttgctttgaattctctggagggttcaatccctcgtcaacttggaaatctctcccagttgcagcatcttgatctcagcgccaatcattttgaaggaaatataccctctcaaattggaaatctctcccagttgctgcatcttgatctcagctacaattcttttgaaggaagtataccgtcccaacttgggaacctttcaaatttgcagaagctttatcttggaggcggtgctctcaaaattgacgatggagatcataggctgtctaatctcatttctttaacccatctttccgtgttacagatgcctaatctcaacacttctcatagcttcctccaaatgattgccaagctaccaaaacttagagaactgagtttaagtgaatgtagccttcccgatcagtttatccttccattgaggccctctaaattcaatttttctagttccctttccgtccttgatctttccttcaacagcctcacgtcatcaatgatactccagtggctgtccaacgtcacttccaaccttgttgagcttgaccttagttataacctcttggagggttccacatcaaaccattttggccgtgtaatgaattctcttgagcacctcgacctctcatataatatattcaaggctgacgatttcaaatccttcgcgaatatatgcaccttacattctttatacatgccagcaaaccatttgactgaagaccttccatcaatccttcataatttgtctagtggttgtgttaaacactcattacaagatttggatttgtcagataatcaaatcactggctctttacccgacctttcagtattctcatctctaaaatcattgtttcttgatcaaaatcaattaaggggaaagatacctgaaggcatccgcttaccgtttcatttggaatctctgtcaatccaatcaaactctttagaaggtggaattcccaaatcatttgggaactcatgtgctttgagatcactggatatgtctggtaacaatttgaataaagagctttcggtgataattcatcaattgtctgggtgtgccagattctcgctgcaagaattgaacataggaggaaatcaaatcaatggtacgctttctgacctttcaatattctctgccttgaaaacattgggtctttcacgaaatcaattaaatggaaaaattccagagagtaccaaattgccatctctgttagagtctttgtcaattggatcaaactctttagaaggtggaattcacaaatcatttggggatgcatgtgctttgcgctcattgcacatgcctaataatagcttgagtgaagagtttccaatgataatccatcacttgtctggatgtgctagatattcattggaacgattatatctaagcatgaatcaaatcaatggtacgcttcctgacctttcaatattctcatctttaagaggattatatcttgagggaaacaagctaaatggagagattcctaaagatattaaatttccacctcaactggagagactagatatgcaatcaaattccttgaagggtgtgctcactgactatcatttcgctaatatgtctaagttagaccacttggagttatctgacaactctttagtgaccttggcatttagccaaaattgggtcccaccatttcagttgcgcttcataggattgcgatcttgcaagctaggtccagtatttcccaaatggttggagacacaaaatcaatttcagggtattgacatttcaaatgctggaatagcagatatggttccaaagtggttttgggctaatttagcattccgagaattgatttcaatgaatatttcatacaataatctccatggtataattccaaattttccaataaggaatattcaacattccctaattcttggatcaaatcaatttgatggccctgttccaccatttctgcgaggtttcgtatttcttgatttatccaaaaataaattctcagattctctttcatttttatgtgtgaatgttaaagttgaaactttgtacgaattagacctttcaaataatcatttctctggaaaaattccggactgttggagccatttcaagtcattaacttatttggacttaagtcacaataatttttcaggaaggatacccacatccatgggatctcttcttcatcttcaagcattgctattgagaaacaacaacttaacagatgagatacctatctccttgaggagttgtacaaatctagtaatgctagatatttcagaaaacagattatcagggcttatccctgcttggattgggagcgaattacaagagttgcaatttttaagtttgggaagaaataatttccatggaagtttaccattgcaaatttgctacctaagtgacattcaactcttggatgtgtcactaaaccgcatgtctgggcaaattcctaaatgcataaaaaattttacttcaatgactcaaaagacatcttcaagagattatcaaggtcattcatatcttgtcaataccattggcatttattattattatacatatgatttgaatgcactcttgatgtggaaaggttcagaacaaatgttcaaaaataatgtgttactacttttaaaaagcattgatctctcaagcaatcacttttctggagaaattccactggaaatagaggatttatttggattggtttcattgaatttatcaagaaaccatttgaccggagcgattccttcaaatattggaaagttaacattacttgactttcttgatttgtcaagaaaccatctaattggttcaattccatggagtcttactcaaattgatcgactcggcgtgttagatttgtcacataacaatctatctggagaaattccaactggtacacaattacagagtttcaatgcctcatgttatgaagataatcttgatctttgtggaccgccactagagaaattgtgtattgatgggaagcctgcacaggaaccaattgttaaacttcctgaagatgaaaatttgcttttcacccgtgaattttacatgagtatggcaattggatttgttataagcttttggggcgtttttggctcaatcttaatgaatcgttcttggagacatgcttatttcaagttcataagcaatttatcagacgctatttatgtcatggtagcagtgaaagttttcaagtggcgtcacagacgatagctggtgccagcttgttgaggtggaaaatgcaaagagacacttttaatttggaggtgagaaggcatctctcacagttggatttggagaccgagagagaattaaggaaggcttctagagcttgagggagccaattgtgattgtgatccatctagtttattttcctttttaatttctaagcattttgtttgtagtttggcctttaaatctgaactggttgttttgtatgaagttgatgaatcttcataataatgggaactgagaggtttggttattgcttcttcatttttgggtcatgctatttgattatgtagaaatagaaaaccgtgtttgatctagggattttgtgttgcttttgtacattagtctcatgatttcatttaaggaattaagttatatgagattaaa

SEQ ID NO: 676 - DNA, 1425 bp, Glycine max
atgaaagacaccattgttctataccctaatgttctaaggggacacctagtttccatggtggagctaggcaaactcatactaactcaccacccttcactttccatcactatcctcatcctcactccaaccaccacctcttccaccaccagcgtctcctgcaactctaatgctcgatacatcgccaccgtcaccgccacgacccccgccatcacattccaccacgcccccttcgccacactccccccctccactccttccctcccctctcacatcctctccatcgaactcacccgccacagcacgcaaaacctcgccgttgccctccaaaccctcgccaaagcctcgaacctcaaagccctcgtcattgacttcatgaacttcaacgaccccaaagccctcactgaaaatctcaacaacaacgtccccacttacttctacttcgcttcatgcgcgtcctttctctctctactccttcgtttaccaaccattcaccaaaccgttactagagagaaggtcaaagaccaaccgctgcagattcaaatccctggattacccacaatctccaccgacgattttccaaacgaggccaaagacccttcgagtgaaagctaccagtccttgcttcaggtagcggaaaacatgaggtgcagtgttggcattatagcaaacacgtttgaagcccttgaagagaaatccatcagggcgttatgcaaagatgggacgttgccgcctttgttttttatcggaccgttgatctctgcaccgtatgaagaagacaaagggtgcctgagttggctagactcgcaaccgagtcagagcgtcgtgttgctgagtttcggaagcctcggaaggttttctagggctcagttgaaggagatagccattgggttggagaagagtgagcaaaggttcttgtgggttgtgaggtccaggttggatgatgctgactcgatggaggaactgagtctggacgagttgatgccagaagggtttctggagaggaccaaagagaaggggctgataatgagaaactgggccccacaggttcagttactgagtcatgactcggtgggtgggttcgtgactcactgcgggtggaactcggtgttggaagcagtgtgtgaaggggtgccgatggtggcgtggcccctctacgcggagcagaagatgaatagggtgattatggtgaaggaaatgaaggtggctttggaggtgaacgagaacaaagatgggttggtgagtgcaacagagttgggggaccgagtcagggaactgatggactcggtaaagggaaaagagattagacaaagggttttcgagatgaaaaaaagggctgaggaagcaatggctgaaggtggaacctcgtgcgtcacgttagataagttggctatcaagttgtggaaaggaaacatgattgacatctaa

SEQ ID NO: 677 - DNA, 1762 bp, Glycine max
gaaaaagttagtgtaataaaatagtaagactattagtctgttagatggctcactctccgtcaccataaatacatagagctaacatctcccttgaactccatccaaagaaccaaatccatctcaaaatctcatcacttttcaaacatgaaagacaccattgttctataccctaatgttctaaggggacacctagtttccatggtggagctaggcaaactcatactaactcaccacccttcactttccatcactatcctcatcctcactccaaccaccacctcttccaccaccagcgtctcctgcaactctaatgctcgatacatcgccaccgtcaccgccacgacccccgccatcacattccaccacgcccccttcgccacactccccccctccactccttccctcccctctcacatcctctccatcgaactcacccgccacagcacgcaaaacctcgccgttgccctccaaaccctcgccaaagcctcgaacctcaaagccctcgtcattgacttcatgaacttcaacgaccccaaagccctcactgaaaatctcaacaacaacgtccccacttacttctacttcgcttcatgcgcgtcctttctctctctactccttcgtttaccaaccattcaccaaaccgttactagagagaaggtcaaagaccaaccgctgcagattcaaatccctggattacccacaatctccaccgacgattttccaaacgaggccaaagacccttcgagtgaaagctaccagtccttgcttcaggtagcggaaaacatgaggtgcagtgttggcattatagcaaacacgtttgaagcccttgaagagaaatccatcagggcgttatgcaaagatgggacgttgccgcctttgttttttatcggaccgttgatctctgcaccgtatgaagaagacaaagggtgcctgagttggctagactcgcaaccgagtcagagcgtcgtgttgctgagtttcggaagcctcggaaggttttctagggctcagttgaaggagatagccattgggttggagaagagtgagcaaaggttcttgtgggttgtgaggtccaggttggatgatgctgactcgatggaggaactgagtctggacgagttgatgccagaagggtttctggagaggaccaaagagaaggggctgataatgagaaactgggccccacaggttcagttactgagtcatgactcggtgggtgggttcgtgactcactgcgggtggaactcggtgttggaagcagtgtgtgaaggggtgccgatggtggcgtggcccctctacgcggagcagaagatgaatagggtgattatggtgaaggaaatgaaggtggctttggaggtgaacgagaacaaagatgggttggtgagtgcaacagagttgggggaccgagtcagggaactgatggactcggtaaagggaaaagagattagacaaagggttttcgagatgaaaaaaagggctgaggaagcaatggctgaaggtggaacctcgtgcgtcacgttagataagttggctatcaagttgtggaaaggaaacatgattgacatctaactgtttgtattaaatttatactgcgtagggactacccttaacatgtctcctctaactagggctcattatcacaaattctgataccatattaaatttatagtagagtatagatattcgaaagattcctttaaaaaccgatttataaatgatgatctatctaactatatcaacatttatcatgtttatgaattac

SEQ ID NO: 678 - DNA, 642 bp, Glycine max
atgttttatgcttccaactcattttttgactatgccaagaacagaaggatattatggggatggtcaaaggagtgtgaaaccacacaagatgattatgagaaaggatgggctggtctacagagtattccaaggcaagtttggcttcataaaagtgggaagtggttgatgcagtggccaattgaagaggtagaaaaactacatgacaaacaagttagcataatgggagagaaactggttagtgaatcaactattgaagtctctggtatccctgcatcacaagtcgatgtagaagtgtggtttgagctacctgaactagagaatatggagtggctaaatgaaagtgaagttgatccccacttgctgtgtagtgaagagtatgcatcaagaagtggcataataggtatgtggccgctggttgatctcttgcattggatacaactattggtatgtggccgctggttgatcattggtgccagttcttgcaggctcggcataacaaagcaatatctagggacacatggtctcagcttttggagtttgcaaagaatgatacataatattaaacatagcggccgccaaagtggcttgttgttcaggacctgtaggggccagttatattcagagggcggtggtgggccgtga

SEQ ID NO: 679 - DNA, 7228 bp, Glycine max
attctaataagagaaaaaaggatggctcaatatcgtgctctctaaggaagaacagaagatcttctattgctggtgaggaggataaaggtggtaaaacctcaaggcagctgagaaaacaagcagctcgtaaacctgcaaacagttcattcaatgaggatgttgaagatttggaaggaactaacctgaacttattattggaccatggaatgttttatgcttccaactcattttttgactatgccaagaacagaaggatattatggggatggtcaaaggagtgtgaaaccacacaagatgattatgagaaaggatgggctggtctacagagtattccaaggcaagtttggcttcataaaagtgggaagtggttgatgcagtggccaattgaagaggtagaaaaactacatgacaaacaagttagcataatgggagagaaactggttagtgaatcaactattgaagtctctggtatccctgcatcacaagtcgatgtagaagtgtggtttgagctacctgaactagagaatatggagtggctaaatgaaagtgaagttgatccccacttgctgtgtagtgaagagtatgcatcaagaagtggcataataggtatgtggccgctggttgatctcttgcattggatacaactattggtatgtggccgctggttgatcattggtgccagttcttgcaggctcggcataacaaagcaatatctagggacacatggtctcagcttttggagtttgcaaagaatgatacataatattaaacatagcggccgccaaagtggcttgttgttcaggacctgtaggggccagttatattcagagggcggtggtgggccgtgatgggaacggagaagggagcaatggaagactgggtggatatgtgcgtccggtgggagattgagtcgataggcgaccagaccaatgcgttcaacaatttgaaatgggccaaagaagcgcttagagagttttgggtggtacggtccggtgaccgacgtctgtcgtcttgggcgcagcttgacatatacccattgcccctattcgaaggtgatatcatcgcatttgacatcaacgtacctcttcatagcatcttgggccttctttaagcgttgcttaagtttggagtgcaattgttgacgagactcaagcaaggtttggacaacttcgttattcgtcatgcccgtgacataatcgaggattgtaggtggtggcttaccgtagatgatctcaaatggagtcatgccaaagctcgagtgaagtgagtattgtaactccactctgcaagggatagatactggtgccatgtggatggttgatcatgaacgaagcagcggaggtattgctcaagtattcggttcatcaccttcgtctggccatcggactgagggtggtacgtcgtgctgagtcgcaatcgtgtgccgcttaatcggaataactccttccagaacttgcttaagaagatagggtcgcggtcagacactatgcttttaggaaacccatgttgtttacagacggtgtcaatgaagaggccggcgaccctgaacgctgtgaatcccgtgggaagagcacccaaatgcacccccttcaagaacctatctaccacaaccatgatgacagtaaatccgttagaggttggtaaatgggtgatgaaatccattgaaaggtcttcccacacgccctccggtgccggcaagggttgcagcagtccagctgggcgcttatggagatttttattctgttggcaggtaacacattctttaataaacctcttaacatcctattgaaggttgagccagaaaaaacttgatgcgagacgatgggttgttttggcaacacctaaatggcctccaagtggggtcgcgtgatgctccgaaatgaggatatggagataaggattgctgttattaagccagatgcgtcccttgaacaatattaatccatcgccgaaagagtaatcaaggtaagaggttgggtgttcctgaatggcatccttgagttgctagaatttcaggttatcagcgagtgactacttaatatcatggaggaaatcaagttgtggtatggagaggatgaggaactggccctctgggtttggagctcacgaaagggcatctactactacattcattgcgccggacttgtactggatggagttctcatagccaagcagtttcgaaaggtaataatgttgtttcggcgtttgaatgacttgtgtcattaactctcggagacttttgtgatcggtgaggatcgtgaatggccggcccaggaggtattgcctccacttcctcactgccgtcacgacggcgtggagttcacgtatatacgtggatgcatgaagtagccgaggtccaaggtgcttactaaaatacgccaaggggtggccattctgcaacagcactgcactaatagttgttccagatgcatcagtttcaaccacgaagggctcggagaagttaggtagggcaagtacaggtgcattggtcatggcgagtttgagctggtcgaaggcctgctgagagtccggggaccaatcgaaggcgtctttgcaaagcaaggtcatgagtgaggtcgtgatggaagcataccctttaataaattttctataaaatccagtaagcccttagaatgcacgtagttctcggaccgaagttggtggtggccactgcaacatagcttggaccttggagggttctggagtaacacccttgccagacacgatgtggccgagatattcaatggattcttgagcaaagaggcacttagaatgcttaaggtaaaactcagcgtgttggagggcttgaaatataatctccaggtggtataaatgtgaggataacgaatcactataaaccaatatatcgtcaaaaaaactctggcaaaccttcgtaggaatggttgcaggagttggttcatagcggattggaatgttgaaggtgcattgcagagcggaaggtgcattgcagagcccaaagggcatcaccaaatattcgaagtggccattatgggtgcggaaggctgttttctcgatgtctagttcactcatcaagatctggtggaacccctgtcggaggtccagctttgagaaccacgaagcatggcccaattcgtcaagcaattcatctattgtcggaatggggaagtggtcgcgaatggtgactgagtttaaggctctgtagtcaacacatagccgccaagtggcgtccttcttcttaaccaagagtacgggggaagaataaggactggtactcgatctgatcagtctggcgacgaggaggtccgagacttgtctttcaatctcattcttttggaagtgtggatagcggtaaggtcgaacggatattggggtagtgaagggatgaagggtgatacggtgaaccacctagcgtggcgaaaggagtcgagatagggtccggaacacgtgctcatattggtgaaggaggtgttccacagagatgaaagggtgttgggtcgtggttgggtcgggttggtccgtgggtaggaggtgtagttggtataaggccgaagtggaacccgtttggatgaagtgcttcagttcggccgctgaggctggttcgggcccaagattaacatctgccttgagtgtgatatctcgacccaggtggttaaaatgcatgatgcattctgcgtagtcagtcgtaactggacccaggtgtttcaaccaatctatccctaacactgcatctgcaccacttatctggagcaagtggaaggagaccacgaaggggtgaccttggatagtgacctgagtttcaggacaaacctggtcactggctaacgtagaaccgttgcccaccattacttggaggggatgagtagtttgtagaagaagtttaaggaattgcgcgattcgtggttgaaggaagttatgagtacttccactatcaatcaggactgtgagacgtgcttttttaatggtgccaaagattcggaaggtttccgatgagggtagtccaccaagagcgtgaagactgatgtgtgagcagaccgcctccggtatcggttttggagagttcccgtgagctgctgtctgatcatcttgtggttcaggttcaatggcctcattgatttgtgactgttcgtcagtgatgaagagtaacactcgacccttgcacctgtggttagcactccatttttcatcacaattatagcataatccttttttctcgccggaaagccatttctgccggcgtgcgcttcacaaatggtgtagttttggatgaagtattcgaagcttgaggaacgaagggcctgggttggggaaagcttcggggtgcctggttcgttcgatcacgtagcttctcttcttgaagcttagctagggctgtagcttggagtagggatattggttgaagagccatgacctcacgtcgaacttcagggtttaatcctgagataaagcaacttaaaaggaaaggaggtggatgacctaccacgcggtttgcttacctctcaaactccgttaggtattcgttcaccgtgcatgtttgcgttaatttgaacaatgctcctttaggatcatcataaaatgttggcacaaatcgtgattcaagagcttgcagaaagccttcccaggacgtgataaagtcgttgctgaacatccattgataccagtttaaggcggcgccgtcgaggtatagggatgcgactgtgattcgttcttcctcaggtgcattttgatattggaaaagctgcgtgatcttgaagattcggcctaatggatcgcgtccatcaaaacgcggtatatctagtttaactgtgttgcattgatggctatgatggtttgtggcaggtgtgtttgtgtggttgccggaatcgttggaacgaaggtgctctagaatggagtctaccttgcccgcaaggtcgttgtaacgttcattgatagaagcatggccattagagagcctcacaatggcttcttcaaggcgatcagttgttgttttcctggttccgtggtcagccatggagatggagacggcggaggtcggaccagttgttaggtgttgcacgaagggaaaaggaagagcacgatggctcgcggtggaggaatgaatctagacgtgaagagggaaggatgcgcccttattcgaggaagggaataactcttgagtaaaacgtatatttctcatgcctttattatgtagtagcaaggcttcatggtgaatgtgattcaaaggtgttttgatgataacaatgatgacaacaaaagatgatgacaaaggtgatgaacaaaaagctcaaagatcaaagaacaactcaagtgaatcaaagaacatctcaagtgaatcaagaacaagtcaagagttcaagaattaagaagaattcaagactcaagaagaaagcctagaatcaagaatcaagattcaagatctcaagaatcaagatcaagattcaagaatgaagaaaagactcaatcaagataagtattaaaaagttttttcaaaactttgaatagtacatggttttttgacaaaacctttaccaaagagtttttactctctggtaatcgattaccatattattgtaatcgtttactagtagcaaaatgagtttgaaaaagttttcaaactgagtttacaacgttccaattattttcaaaaggctgtaatcgattacaatgttttggtaatcgattaccaatgctcttgaacgttgaaattcaaatttaaatgtgaagagtcacatcttttcactcaaaagctttgtgtaatcgattacacttatttggtaatcgattaccagtgactgtttctgaaaaaatcaaaagatgtaactcttcaaaaaggttttgactatttcaaatgggttttaagtttttctaaaagttataactcttctgaatggtcttcttgacaagacatgaagagtctataaaagcaaggctttgttttacatttcaacgatcaaaaatactttttgcttttccaatcaatcctttacaagccttgaaatctctttgaacttcttcttcttctttgtaccaaaaagctttctgaagttttctggttttctaaaccttgaaaacttgtgctattcatccttttcattctcttctccctttgccaaaaagaattcgtcaaggactaaccgcctgaattctttttgtgtctcttttctcccttttccaaaagaacaaaggactaacagcctgaattcttttgtgtctcccttctcccttgtcaaagaattcaaaacgacacagtctgagaattcttttgattctttcctttccctaatacaaaagtgttcaaaggactaaccgcctgagaattcttttgtatctccattcacaaagtatcaaaggtttaacaacctgagatctttgtcttaacacattggagggtacatcctttgtggtacaagtagatggtacatctacttgggtttgactgagaacaagagatggtacgtctcttgtggatcagttctagtgtagggtatatccactaggttcaaagagaacaaggaaggatacatcccttgtggatctttgcttgtaaaagaatttttacaaggttgaaagaaagctcaaggaccgcaggtcgcttggggactggatgtagacacaagttgttgccgaaccagtataaaaactcgtgtgtgtttgtttccttcttccctactcttttactttccgctgtgcatttaattttcgcttttactttttgttaagtttctcttctactcctcattctcttaacaatttagtaaaagccttaaaagaataattttttaattggtaaaagtttaaaaataattaattcaatctcccttcttaattattttgagaccactcgatccaagatattataatgtatatcagccttttatagctagtggtacatgccaggataactgccctgcctaattctgttgtaactattaattcttatcatcacgtgctttattattatttcatgtacaagcttttattccctcccggtaaacccgtcacgtgatagtcacgtaagtgcagaggcactttcttggcacgcacaggtctcgtgctgctgctaacattaaacttcataaatgactttaatgactaataaagatattgacgcacaatgactaacaagacggtttttggcctgagaaaatgaagtaagtttttcacactgtgggaaacaaaatttacaccgttagatatattgctttttaaatcaaaggctgaaattatttgctcttttttcctttttttc

SEQ ID NO: 680 - DNA, 369 bp, Glycine max
atgaagaaagtagtcttacagttggacttacatggtgatagaatcaagcaaaaagctatgaaaacagcatctggcctttcaggggttgaatcagtttctgttgatatgaaagacatgaaaatgatcgtgttgggggacattgatccagtgagtgcagtgtcgaagctacgaaagtgttgtcacactgaaatagtttcagttggaccagcaaaagaggagaagaaggagaatgtggagccagcaaaagtaccagttcctctaaagctccatgaagcctatcccctttattatcagatgacaccacattatggtcaaagtcactatgtcacaagttacgaagaggatcctagtggctgtgtcatctgctaa

SEQ ID NO: 681 - DNA, 429 bp, Glycine max
atgtctcccacgacatgctactataaatgttgctcaatctcagccacacttatcacaacttcatttgcaaattgtcacaccaaaaaattcttgcttagctctcacaaacaatctttaacaacaatgaagaaagtagtattaaaggtggacttaaataatgatagaatcaagaaaaaagctatgaagacagcatctggcctttcaggggttgaatcgatttctgttgacgttaaggacatgaaactagtcttattgggtgagattgatccagtgagtgcagtgtcaaagctacgaaagtggtgtcacactgaactaatttcatttggaccagcaaaagaggagaaggagaaggaccccgctattcctctctacgaagcctatcccctttattatcacatgacaccaacattgtatggttcaaattactag

SEQ ID NO: 682 - DNA, 709 bp, Glycine max
cttgactatgtctcccacgacatgctactataaatgttgctcaatctcagccacacttatcacaacttcatttgcaaattgtcacaccaaaaaattcttgcttagctctcacaaacaatctttaacaacaatgaagaaagtagtattaaaggtggacttaaataatgatagaatcaagaaaaaagctatgaagacagcatctggcctttcaggggttgaatcgatttctgttgacgttaaggacatgaaactagtcttattgggtgagattgatccagtgagtgcagtgtcaaagctacgaaagtggtgtcacactgaactaatttcatttggaccagcaaaagaggagaaggagaaggaccccgctattcctctctacgaagcctatcccctttattatcacatgacaccaacattgtatggttcaaattactaggttagaggttttgaagagagtcttagggctgcgtgatcatctgctaaattctagaatattagaaagtttgataaaaaaaagacttcatagtcatttttgttggttttagttatatttttcattatctagttgaagaccattgtgtgcccaattaagggagtaaacatgcttcttgtatatatagacaaacgtacttggtgtatttgttttagcatcttgatttaggctttttttgtattaaggagacttttatttttttctagctgcggatat

SEQ ID NO: 683 - DNA, 2964 bp, Glycine max
atgtcagaatccaaggaagaaaatcctgaccttcttctcaagtcaaaggcacaggaggaacatgggtttgtcatggattttggcattggcctggaaagtctgtggcccttggatcatatatctttggtctctaaccccatgcctccttttctcttttccactatctctgaacaacctttttctcctgtctgggctttttctgatgctgaagatgagaggcaaatcaggattgcagcttcaggtaatacaaatacaacaactgaaaatccaattgaaaatgatgacaacaaaaaaactgtgccaccccttgtagccatgacagcttcagaaaatccagatggttattgtctgatcaaggaaagaatgacacaagcgcttcgccacttcaaagagttgactgaacagaatgttcttgctcaggtttgggcacctgtgaggaatggaaatcggtatgcacttacaacttcaggccaaccatttgttcttgatccacatagtaatggactccatcagtatagaacagcttccctgatgtatatgttctctgtggatggagagaatgatgagatcctgggacttcccggccgagtttttcagcataaaattccagaatggactcccaatgttcagttttattctagtaaagagtatcagcgcctaaatcacgctcaacattacaatgtccgcggaaccttggccctgcctgtgtttgagcttgcaggacagtcatgtgtggctgtagtggagctgataatgacttcacagaagattaactatgctcctgaggttgataaaatctgcaaagcccttgaggcagtaaagttgaggagttcagaaattttggagcatccatacaatcagatttgtaatgaataccgtcagtacgcattagccgagattttggagatactgacagctgtgtgtgaaactcatagtttgcctctggcacaaacatgggttccatgtaagcatcggagtgtcttggcacatggtggcggtcttaagaaaatttgctcaagttttaatggttgttgcatggggcaagtttgcatgtctataactgaggtagcattctatgtaatagatgctcataaatggggtttccatgaggcctgtgctgagcatcacctacaacaaggtcaaggagttgctgggagggcatttttgtcccacaacatgtgcttctgtggaaacaatacccagttctgcaaaaccgaatatcccttagtacattatgctctcatgtttcatttaaacagctgttttgcagtatgcttacaaagctctcatacaggaaatgatgattatgtactagagttttttctgcctcctgggatcactgactttaatgaacaaaaaagattgctgggatccatattggcaacaatgaagccacattttcagagtcttaagattgcttctggtgttgaacttgaggggaatgcttcaattgaaattatagacgcaagaaatgaaagagttcatttgagatttgagtccattccaattacacaatcttctaagtcaccacctagacatacctcaccaaatatgggggaggggctgccactggagccatcagaaccgaaaataatggcatactttgatggtataaatgatggagggagtcttggtgataatgcaggcggacacattgatcagaacacttccttagagatcaaaaccaaaaagaaaccctcagatagaaaacgtggaaaagctgagatatcaattagtcttaatgttttgcaacattacttcacaggaagccttaaggatgctgcaaagagccttggtgtttgccctactacaatgaagcgcatctgtaggcagcatgggatatcacgttggccatctcgaaagataaaaaaggttaaccattccctgtccaagctcaagtgtgttattgaatcggtccatggtgctgaaggagcatttggtttgaattctctaagtactggttcacttcccattgctgctggttccttttctgaccctttcacttcaaacaagttccaccgccaaaccaccttgaccattaggccatcagaacctaagatcaacgaaaatgattttgatgcttttggagcatcagaaacaaaaagacaggttgcgatggaagatcaattccttggacttgaagcaaggacacgaagtcctgagaaagtgattaatgataaaggagtgtccattcaggagattggcactaaaggcacaaacaagtttagaactgggagtggctcaagtggcagtggaaatcctactcatgcttcatgccatggtagtcccccaaatgaaatctcacctccaaaagatacatttgtaacaggcaacagtgagcaatgtcttgtgttaagaggatcactggggtcaacaacactgcactcaactagtacaccaaaccgtgcaactgcataccctatgcttcacattgtggaaacaacagaacctcaagaaccatttggaggacagctacttgaggttgctggtagttctaaagacttgagaaatctatgcccttcagcagatgctgttttggaggatcaggttccagaagcttacaagatgaatcctcaatgttctgatttgcctcaaatgcaacacatggatacccttaataaaactatgacaccttttgcagttagaaaagaggtgaacagtgtgaccattaaggcaacatataaagaagatatcatcaggtttaaggtctctatggactgtggtattgtggaattgaaagaggaaattgccaaaagattgaaactagaggtgggaacatttcataacaagtatctggatgatgatcatgaatgggttttgatagcctgtgatgcagacctgcaggagtgcatggacatctcaagatcatcaggcggcaacataatcaggcttgtggtgcatgatatactgcccattcttggaagctcttgtgagagctcaagagattggaaaggttgtatatag

SEQ ID NO: 684 - DNA, 3318 bp, Glycine max
attcaatcaactttagtctcaacaagcaagtggcataatatccatagtaaaaattttattttgttacatattctgatattctccaccttctgcaattttactcaaccatcattttcaattgtatagtagttctcaagtctctcttcatcatcattacaaggttccaaacttaatcactctgtacaaaccaatttccaagaaaaaagcatccttgtgaaaaatgtcagaatccaaggaagaaaatcctgaccttcttctcaagtcaaaggcacaggaggaacatgggtttgtcatggattttggcattggcctggaaagtctgtggcccttggatcatatatctttggtctctaaccccatgcctccttttctcttttccactatctctgaacaacctttttctcctgtctgggctttttctgatgctgaagatgagaggcaaatcaggattgcagcttcaggtaatacaaatacaacaactgaaaatccaattgaaaatgatgacaacaaaaaaactgtgccaccccttgtagccatgacagcttcagaaaatccagatggttattgtctgatcaaggaaagaatgacacaagcgcttcgccacttcaaagagttgactgaacagaatgttcttgctcaggtttgggcacctgtgaggaatggaaatcggtatgcacttacaacttcaggccaaccatttgttcttgatccacatagtaatggactccatcagtatagaacagcttccctgatgtatatgttctctgtggatggagagaatgatgagatcctgggacttcccggccgagtttttcagcataaaattccagaatggactcccaatgttcagttttattctagtaaagagtatcagcgcctaaatcacgctcaacattacaatgtccgcggaaccttggccctgcctgtgtttgagcttgcaggacagtcatgtgtggctgtagtggagctgataatgacttcacagaagattaactatgctcctgaggttgataaaatctgcaaagcccttgaggcagtaaagttgaggagttcagaaattttggagcatccatacaatcagatttgtaatgaataccgtcagtacgcattagccgagattttggagatactgacagctgtgtgtgaaactcatagtttgcctctggcacaaacatgggttccatgtaagcatcggagtgtcttggcacatggtggcggtcttaagaaaatttgctcaagttttaatggttgttgcatggggcaagtttgcatgtctataactgaggtagcattctatgtaatagatgctcataaatggggtttccatgaggcctgtgctgagcatcacctacaacaaggtcaaggagttgctgggagggcatttttgtcccacaacatgtgcttctgtggaaacaatacccagttctgcaaaaccgaatatcccttagtacattatgctctcatgtttcatttaaacagctgttttgcagtatgcttacaaagctctcatacaggaaatgatgattatgtactagagttttttctgcctcctgggatcactgactttaatgaacaaaaaagattgctgggatccatattggcaacaatgaagccacattttcagagtcttaagattgcttctggtgttgaacttgaggggaatgcttcaattgaaattatagacgcaagaaatgaaagagttcatttgagatttgagtccattccaattacacaatcttctaagtcaccacctagacatacctcaccaaatatgggggaggggctgccactggagccatcagaaccgaaaataatggcatactttgatggtataaatgatggagggagtcttggtgataatgcaggcggacacattgatcagaacacttccttagagatcaaaaccaaaaagaaaccctcagatagaaaacgtggaaaagctgagatatcaattagtcttaatgttttgcaacattacttcacaggaagccttaaggatgctgcaaagagccttggtgtttgccctactacaatgaagcgcatctgtaggcagcatgggatatcacgttggccatctcgaaagataaaaaaggttaaccattccctgtccaagctcaagtgtgttattgaatcggtccatggtgctgaaggagcatttggtttgaattctctaagtactggttcacttcccattgctgctggttccttttctgaccctttcacttcaaacaagttccaccgccaaaccaccttgaccattaggccatcagaacctaagatcaacgaaaatgattttgatgcttttggagcatcagaaacaaaaagacaggttgcgatggaagatcaattccttggacttgaagcaaggacacgaagtcctgagaaagtgattaatgataaaggagtgtccattcaggagattggcactaaaggcacaaacaagtttagaactgggagtggctcaagtggcagtggaaatcctactcatgcttcatgccatggtagtcccccaaatgaaatctcacctccaaaagatacatttgtaacaggcaacagtgagcaatgtcttgtgttaagaggatcactggggtcaacaacactgcactcaactagtacaccaaaccgtgcaactgcataccctatgcttcacattgtggaaacaacagaacctcaagaaccatttggaggacagctacttgaggttgctggtagttctaaagacttgagaaatctatgcccttcagcagatgctgttttggaggatcaggttccagaagcttacaagatgaatcctcaatgttctgatttgcctcaaatgcaacacatggatacccttaataaaactatgacaccttttgcagttagaaaagaggtgaacagtgtgaccattaaggcaacatataaagaagatatcatcaggtttaaggtctctatggactgtggtattgtggaattgaaagaggaaattgccaaaagattgaaactagaggtgggaacatttcataacaagtatctggatgatgatcatgaatgggttttgatagcctgtgatgcagacctgcaggagtgcatggacatctcaagatcatcaggcggcaacataatcaggcttgtggtgcatgatatactgcccattcttggaagctcttgtgagagctcaagagattggaaaggttgtatatagtttggcttgtattcaattatttagattcttgtagttataagtaatagctttttattgtgataaagtaatgaccttttatcaaaaaaagaaaaaaagtttcatatatgtgcaaaatgcaagaaacatacttttgg

SEQ ID NO: 685 - DNA, 1148 bp, Glycine max
tttttaagaaaataaaattatgtttttaatccatgatttatattcgactttttatttgatcttttgacaatttttttcttcaacgaaaatctctaatatttgaaatcttttgctttaaatctctatcattagttaaataataatgtatcggttaaatattcggtagattgttgcagtggtctcacacaagccatgaagaccaacaagaagtgtgtctgccttattctcaaagacagggatgatcctgaccttggcttgaagattaacatgacaattgctgttggtctcccttctctttgcaaaactcctgataatctctcacagtgctctgctgaaggaagttcccagaatggtagaaaccaggggacagatgaaatggccacagctaagaagaatagtgcgtcttatatcgggaagagattgttagaaagtttggttgcagttgcagggcttctaatttggctttcatgagctttactcaaatactacctatatattaccattctcatatcatgttgaaacgtaaaccattgattagttgatagtgtaaaaatatttacactcgagtgtattaaatctctgacagactcacaatagatattattgcaaaaccttattggagatttattttggacaaagaaattaatggtgctgatggcgtcaacaaattccaatcaggggaagaagaggaagataaggaacagtgcagtccagtatctgttttagacccacccttcgatgacgatgatgatgggcatgatgatgaccatgaaggggatggttttgatttggactgtagctatcccaatgtacaaagtatgtcattgtttaaaaatattttattttattttgtagcattttatgttgtgtggtcgtcttccatcaacatgccatcgtacacgcttcttcaaagttgattgtctgttacaaaataccataagctgagatgttttgtgctaatgccacctatctttggtgggttccattggaagattgcaatagctcatcatccaacatgcatttcgcattcaatgtgaaattggactactctttgttcagagctataaatttcaacatgacccacaaattatgttcattctcattcttggcgctgttagtctagtgtgaaaaccgacaaattcagtttc

SEQ ID NO: 686 - DNA, 2733 bp, Glycine max
atgcactcctcagctttcaagcatggactagcagacccttcaaacaggctttcatcgtggtctgacaaatcggattgctgtacatggccaggggttcactgcaacaacacaggtaaagtcatggaaatcaatctctacacacctgcgggctctccctatagggagttgagtggagagattagtccttctttgcttgaactaaaatatttgaatcgtttggacttgagttcaaattattttgttcttactccaataccaagcttcctaggctcattggagagtctgagatacttggaccttagcttaagtgggttcatgggattaatccctcatcaactaggaaacctctcaaacctgcagcaccttaatctgggatacaattatgctcttcagatagataaccttaattggatatcaaggctatcttccttagagtaccttgatttgagtggttcagaccttcataaaaaaggtaactggcttcaagtactgagtggacttccatctctttcagaactacacttggagagctgtcaaattgataacttaggaccaccaaaaggaaaaaccaacttcacacatctccaagtccttgatctttcaattaacaatctcaatcagcaaatcccttcatggctatttaatctcagcacaactcttgtccaacttgatttacacagtaaccttttacagggacaaattccacaaataatatcaagccttcagaacataaaaaatctagacctgcagaacaaccagctcagtgggccacttccagattcattaggccagcttaagcatcttgaagttctaaatctcagtaataatacctttacttgtccaattccctcaccatttgcaaacttgtcattcttgagaactttaaacctggctcacaaccgactgaatggaaccattcctaagagttttgagctcctcagaaacctgcaggtattaaatcttggaactaattctttgactggtgatatgcctgtaactcttggaactctctcaaatttagtaatgttagacctttcatctaatttgttagaaggatctataaaagagtcaaattttgtaaaacttttgaaattaaaggaactacgtttgtcttggacaaacttgttcctcagtgtcaactctggatgggttcctccttttcagcttgaatatgttttactgagctcctttggaataggtcctaagtttccagaatggctaaaaaggcaaagttctgtgaaggttttgacaatgtctaaggcaggtattgcagacttggttccaagttggttttggaattggactttgcaaactgaattcctggatctgtccaacaatctgttaagtggagacctatctaacatctttctcaattccagcctcataaatttgagttctaatttgttcaagggtacattgccaagtgtgtcttcaaatgttgaagtgctgaatgttgccaataactcaatttccggaacaatttctccctttttattgctgaatgttgccaataactcaatttccggaacaatttctccctttttatgtggaaaggaaaatgctactaataatttgagtgtgcttgatttttcaaataatgtcttatctggtgatcttggtcactgttgggtgcattggcaagcatcgcatagcgaagagcctctgggcaatggtgtacgaagttttattccaaactccatggggtatctatctcaacttgagtctttgttgttagacgacaaccgcttctctggatatattccttcaacactgcaaaattgctctacaatgaaattcattgacatgggcaataaccaactttctgacgcaataccagattggatgtgggaaatgcaatatctaatggttcttcgtctaagatccaacaatttcaatggcagcattactcaaaagatttgtcaactttcttcccttatagtgctggatcttggcaataacagcctgtcaggatccattccaaattgtttggatgacatgaagacaatggctggtgaagatgacttctttgccaaccctttaagttattcatatggctctgacttcagttataaccactacaaggaaactcttgtcttagttcccaaaggagatgagttagagtacagagacaatctgatattggtgagaatgattgatctttcaagtaataagctgtctggagcaattccatctgaaatttccaagctatctgctttgcggtttttgaacttgtctagaaatcatctgtctggagggataccaaatgacatgggaaaaatgaaattgttagaatcccttgatctctcactaaacaacatttcaggtcaaatccctcaaagcttatctgatttgtccttcctcagtgtcctgaatctatcatacaacaacttatcaggcagaattcccacgagcacccaacttcagagctttgaagaacttagctacactggaaatcctgagctttgtggtcctcctgtaacaaaaaattgcacagacaaggaagagttgacagagagagcttctgttggacacggtgatggtaatttctttggaacatcagagttttatattggtatgggagttggatttgcagcaggattttggggtttttgcagtgttgttttcttcaacagaacttggaggcgtgcttattttcattatcttgaccacttgagagatctgatttatgtgataatagttttgaaggtaagaaggttacttgggaaattgtga

SEQ ID NO: 687 - DNA, 3108 bp, Glycine max
atgcaaagtccatctgacataagtgaatgtgcgttaagccgcaagctttggttgttgagcttaccatgcagagagagtgtgtgcatcccaagtgagcgtgagacacttttcaagtttaagaataatctcatagatccttccaataggctttggtcttggaatcctaataataccaactgttgccactggtatggagtcctctgccacaaccttacttcccatcttcttcagcttcacctccacactacacctcctgcttctttcgatgattgggaagcttttaggagatggagctttggtggagagataagtccttgtttggctgatttaaagcatttaaattacttggacttgagcggcaatacatatcttggagaaggtatgtcaattccttctttccttgggacaatgacttccttgactcacctcaacctctctcttactggattctatgggaagattcctcctcagattgggaatctctcaaatttggtgtatcttgacctgagttctgttgttgccaacggaacagtaccctctcagatcgggaatctctctaagcttcgatatcttgacttggcctacgtggattttgaagctgaaaatgtagaatgggtatcaagtatgtggaagcttgaatatcttgatttgagtaatgcaaacctatccaaagcatttcattggctacacactctccaatctcttccttctttgacccacctatctttgtcaggatgcaaactccctcactataatgaaccatccttgctcaacttctcatctctgcaaactctccatctttccttcactagttattcccctgccatttcttttgtccccaagtggatattcaaattgaagaatcttgtttctcttcaattatcagataattatgaaatccaaggtccgattccttgtggtattcgaaacctcacacatcttcaaaatcttgacttgtctttcaattcattttcatcttctataactaattgcttatacggtcttcatcgtctcaagttcctcaatctaggggacaacaacttgcatgggactatttctgatgccctgggaaatttgacttctcttgttgaacttgatttatcaggtaatcaacttgaaggaaccattccaacttctttgggtaatctctgcaacttaagggtgatagatttatcatatctcaaactcaaccaacaggttaatgaacttttagaaattcttgctccttgtatttcccatggactcacaacacttgcagttcagagttcacgactttcaggcaatctgacagatcatattggggcatttaaaaatattgagctgctagattttttcaacaactcaattggtggtgctcttcctagatcatttggaaaactttcatcattaagatatctcgatctctctatgaataaattcagtggaaatccatttgcaagtcttcgatcactctctaaattgttatctcttcatattgacggcaatctttttcacggagttgtcaaggaagatgatcttgcaaatcttacaagcttgacggagattcatgcatcaggaaacaatttcactttaaaagtgggtcccaattggattcctaattttcaacttacctatttggaagtgacatcatggcagttaggtcccagctttccattgtggattcagtcacaaaaccaacttcattatgttggactatctaacacggggattttcgattctattcccacacagatgtgggaagcactttctcaggttttgtatttaaacctctctcgtaatcatatccatggtgagattgggactacattaaagaatccaatatctatcccaactattgatctaagctcaaatcacttgtgtggtaaattaccctatctttcaagtgatgtgcttcagttagatctttcaagcaattcactctctgaatccatgaatgactttttatgtaacgatcaggacaagccaatgcaattacaatttctgaatcttgcatcaaataatttgtcaggagagatacctgattgctggatgaattggacatctcttgtggatgtaaatttacaaagcaaccattttgttgggaacttaccccaatccatgggttccttggcagacctgcagtctttacaaattcgtaacaacacactctcagggatatttccaaccagtgtgaagaagaataaccaattgatatccttggaccttggggaaaataatctttcaggaactattccaacatgggttggagaaaagctcttaaatgtgaaaatcctccgccttcgatcaaacagatttggcggccacattccaaatgaaatatgtcagatgagtcatcttcaggttttagaccttgcacaaaacaatctgtctggcaatataccgagctgtttcagtaacttgagtgccatgacactaaagaaccaaagtacagatcctcgtatctattctcaaggacattatggtacgttttactcttcgatggaaagtttagttattgtgctactatggctgaaaggaagagaagatgagtaccgaaacattctgggtttggtaacaagcattgatctgtcaagtaacaaattattaggagaaatacctcgagaaatcacaagtctaaatggattgaactttttgaacttatcccacaaccaagtgattggtcatattccacaaggcattggtaatatgggatctttacagtccgttgatttttcgaggaatcaactttctggtgaaatccctccaaccattgcaaatttgagctttctgagcatgctagacttgtcttacaatcatttgaagggaaatattccaacaggaactcaattgcaaacttttgatgcctccagcttcatcggcaacaatctatgtggtccaccactgcccataaactgcagctccaatgggaaaacccatagttatgaaggaagtcatgggcatggagtgaattggttttttgtcagtatgacaattggatttattgtgggattctggatagtgattgctcctttgctgatttgtagatcatggcggtatgcctattttcatttccttgatcatgtgtggttcaaacttcaatcttttcgcttaggtagtatcactgtttag

SEQ ID NO: 688 - DNA, 798 bp, Glycine max
tcaaagctcggatatggcaacaacactgaaacaaaaacaactcaaaccactcaatcagcaacctctgcaatagctgataaagctttctcagccaaaaacaccgtagcttcgaagcttggttttggcgacacagcaacaacaacaccacaagagaagagaactgaccatgctgctgctcctacagaatatggaaaaagtgttgctcagtctctgacagagaaactagctccagtttctggaaaagttgctggtgtaggaagtggtgtgaagtccaaagtttctggaactcaaactagtagtgtgggtgtggaacaggacaagggggtttctgtgaaggactatttggtggacaaactgaggcctggtgatgaagacagggctctctctgaagtgatatcagagactctgcacaagaaggaactgcccccagtggaagttactgaagaaggtgtgagaaaggtggtttctgatgctgtgcataagagagaggatgatcctgagagaagaatggaacatcaaagaatactgggaaaggtaactgagtcagaggaagtgaagagaaggttaggaggtgaaagtgtggtgacagagaaaaagtaccaagagatgtatgtgaatagtccggggaaaggtgtggttgataagcttaaaggtatggttgggacatggtttaccaacccagcagagaatcaatcgtcacaagattcatctatgaattatgaggcaggaagggcagaagtggaacaagttaaccaaggtgcagcaggtgaaagaaggctgcaggagtcatctaattga

SEQ ID NO: 689 - DNA, 3048 bp, Glycine max
atgcagaaccaacaactacacttgttttctatatatccttgtgtgatcatgaattcatcctccatttatattcttgtctttgtccagctttggttgttgagcttaccatgcagagagagtgtgtgcatcccaagtgagcgtgagacacttttgaagtttaagaataatctgaatgatccttccaataggctttggtcttggaatcctaataataccaactgttgccactggtatggagtcctctgccacaacgtcacttcccatcttcttcagcttcacctcaactctgctttctatgagaaatcccagtttggtggagagataagtccttgtttggctgatttaaagcatttgaattacttggacttgagcggcaatggatttcttggagaaggtatgtcaattccttctttccttgggacaatgacttccttgactcacctcaacctctctcttactggattcagggggaagattcctcctcagattgggaatctctcaaatttggtgtatcttgacctgagatatgttgcctacggaacagtaccctctcagatcgggaatctctctaagcttcgatatcttgacttgagcgacaattattttgaaggtaatcaacttgaaggaaccattccaacttctttgggtaatctctgcaacttaagggtgatagatttatcatatctcaaactcaaccaacaggttaatgaacttttagaaattcttgctccttgtatttcccatggactcacaacacttgcagttcggagttcacgactttcaggcaatctgacagatcatattggggcatttaaaaatattgagcggctagattttttcaacaactcaattggtggtgctcttcctagatcatttggaaaactttcatcatttagacacctcgatctgtctattaataaattcagtggaaatccatttgaaagtcttcgatcactctctaaattgtcatctcttcatattggcggcaatctttttcacggagttgtcaaggaagatgatcttgcaaattttacaagcttgatggggtttgtcgcatcggggaacagtttcactttaaaagttggtcccaaatggcttcctaattttcaacttacctatttggaagtgacatcatggcaattaggtcccagctttccattgtggattcagtcacaaaacaaacttaactatgttggactatctaacacggggattttcgattctattcccacacagatgtgggaagcactttctcaggttttgtatttaaacctctctcgtaatcatatccatggtgagattgggactacattaaagaatccaatatctatcccaactattgatctaagctcaaatcacttgtgtggtaaattaccctatctttcaagtgatgtgcttgggttagatctttcaagcaattcattctctgaatccatgaatgactttttatgtaacgatcaggacaagccaatgcaattacaatttctgaatcttgcatcaaataatttgtcaggagagatacctgattgctggatgaattggacatctcttgtggatgtaaatttacaaagcaaccattttgttgggaacttaccccaatccatgggttccttggcagacctgcagtctttacaaattcgtaacaacacactctcagggatatttccaaccagtgtgaagaagaataaccaattgatatccttggaccttggggaaaataatctttcaggaactattccaacatgggttggagaaaagctcttaaatgtgaaaatcctccgccttcgatcaaacagatttggcggccacattccaaatgaaatatgtcagatgagtcatcttcaggttttagaccttgcacaaaacaatctgtctggcaatataccgagctgtttcagtaacttgagtgccatgacactaaagaaccaaagtacagatcctcgtatctattctcaagtacaatatggtaagtattactcttccatgcaaagtatagttagtgtgctactatggctgaaaggaagaggagatgagtacggaaacattctgggtttggtaacaagcattgatctgtcaagtaacaagttattaggggaaataccaagagaaatcacatatctaaatggattgaattttttaaacatgtcccacaaccaattgattggtcatattccacaaggtataggtaatatgagatcattacagtccattgatttttcgaggaatcaactttctggtgaaatccctccaaccattgcaaatttgagctttctgagcatgctagacttgtcttacaatcatttgaagggaaatattccaacaggaactcaattgcaaacctttgatgcctccagcttcatcggcaataatctatgtggtccaccactgcccataaactgcagctccaatgggaaaacccatagttatgaaggaagtcatgggcatggagtgaattggttttttgtcagtatgacaattggatttattgtgggattctggatagtgattgctcctttgctgatttgtagatcatggcggtatgcctattttcatttccttgatcatgtgtggttcaaacttcaatcttttcgctcaggtgtgtttcttcccaaattgtgcaaatgctcgtcgacaaatgggtgagatcaaaagctcaggtatggtggctccagcaccttttgatgctgtggagctctcagatgaacctgccgttgctccattcccgcaatactaagtagtagtatttttcttaatgcttgcaagaaataatttaaatgggtgtattttgatgcttaatgcgtgtttagtttgtaataaggatgttgcgctacacaccaatatggaatgtgtcattaatttatgtattctgttttgtacaaaattttaatgctggaagtggtctctcggactcttcccattgaaaaccagtgtagccagctttcattatttttggttaatatatataaattgttctttagtactgattggtctgaatagagtgatagattataactctttaaatgaatggttaagaatttgaattttatc

SEQ ID NO: 690 - DNA, 2700 bp, Glycine max
atggcagtgctatttgcaactcatgttcttctcttgatattgtccactgcaacaactctccacttcagtgcaagcaaggcagcaaggctcaatatgacttgcagtgagaaggaaaggaatgcactcctcagcttcaagcatggactagcagacccttcaaacaggctttcatcgtggtctgacaaatcgcattgctgtacatggccaggggttcactgcaacaacacaggtaaagtcatggaaatcattcttgacacacctgcgggctctccatatagggagttgagtggagagattagtccttctttgcttgaactaaaatatttgaatcgtttggacttgagttcaaattattttgttcttactccaataccaagcttcctaggctcattggagagtctgagatacttggaccttagcttaagtgggttcatgggattaatccctcatcaactaggaaacctctcaaacctgcagcaccttaatcttggatacaattatgctcttcagatagataaccttaattggatatcaaggctatattccttagagtaccttgatttgagtggttcagaccttcataaacagtactggcttcaagtactgagtgcacttccatctctttcagaactacacttggagagctgtcaaattgataacttaggaccaccaaaaggaaaaaccaacttcacacatctccaagtccttgatctttcaattaacaatctcaatcagcaaatcccttcatggctatttaatctcagcacaactcttgtccaacttgatttacacagtaaccttttacagggagaaattccacaaataatatcaagccttcagaacataaaaaatctagacctgcagaacaaccagctcagagggccacttccagattcattaggccagcttaagcatcttgaagttctaaatctcagtaataatacctttacttgtccaattccctcaccatttgcaaacttgtcatccttgagaactttaaacctggctcacaaccgactgaatggaaccattcctaagatgatgttagacctttcttctaatttgttagaaggatctataaaagagtcaaattttgtaaaacttttgaaattaaaggaactacgtttgtcttggacaaacttgttcctcagtgtcaactctggatgggttcctccttttcagcttgaatatgttttactgagctcctttggaataggtcataagtttccagaatggctaaaaaggcaaagttctgtgaaggttttgacaatgtctaaggcaggtatcgcagacttggttccaagttggttttggaattggactttgcaaattgaattcctggatctgtcaaacaatctgttaagtggagacctatctaacatctttgtcaattccagcgtcataaatttgagttccaatttgttcaagggtacattgccaagtgtgtctgcaaatgttgaagtgctgaatgttgccaataactcaatttccggaacaatttctccctttttatgtggaaaggaaaatgctactaataagttaagtgtgcttgatttttcaaataatgtcttatatggtgatcttggtcactgttgggtgcattggcaagcattggtgcatttgaacttgggtagtaacaatttgtctggtgttattccaaactccatggggtatcgatctcaacttgagtctttgttgttagacgacaaccgcttctctggatatattccttcaacactgcaaaattgctctacaatgaaattcattgacaagggcaataaccaactttctgacgtaataccagattggatgtgggaaatgcaatatctaatggttcttcgtctaagatccaacaatttcaatggcagcattactcaaaagatttgtcaactttcttcccttatagtgctggatcttggcaataacagcctgtcaggatccattccaaattgtttggatgacatgaagacaatggctggtgaagatgacttctttgccaaccctttaagttattcatatggctctgacttcagttataaccactacaaggaaactcttgtcttagttcccaaaggagatgagttagagtacagagacaatctgatattggtgagaatgattgacctttcaagtaataagctgtctggagcaattccatctgaaatttccaagctatctgctttgcggtttttgaacttgtctagaaatcatctgtctggagggataccaaatgacatgggaaaaatgaaatttttagaatcccttgatctctcactaaacaacatttcaggtcaaatccctcaaagcttatctgatttgtccttcctcagtgtcctgaatctatcatacaacaacttctcaggcagaattcccacgagtacccaacttcagagctttgaagaacttagctacactggaaatcctgagctttgtggtcctcctgtaacaaaaaattgcacagacaaggaagagttgacagagagtgcttctgttggacacggtgatggtaatttctttggaacatcagagttttatatgggtatgggagttggatttgcagcaggattttggggtttttgcagtgttgttttcttcaacagaacttggaggcgtgcttattttcattatcttgaccacttgagagatctgatttatgtgataatagttttgaaggtaagaaggttacttggaaaattgtga

SEQ ID NO: 691 - DNA, 2349 bp, Glycine max
atgagttgttattctctgaaactattttatgcacttttgctgcttttattgcatgctgctggatccattcttggattcaacagccttcccaatagcacagaaattaagtgcattcagactgagagacaagcactcctcaacttcacacatggcctcaaagatgactctggcatgctgtctacatggagggacgatggcaataacagagactgttgcaaatggaaaggcatccaatgcaacaatcaaactggtcatgttgagatgcttcatctccgtggtcaggatacacaatatttgataggtgcaatcaatatctcttcattgattgcccttgaaaatattgaacacttggatctcagctataatgattttcaaaggagtcatatcccagaactcatgggctcgttcaccaacttaagatatctcaatctctctgcttcttcatttcgtgggactattccttctgatattggaaagcttacacatttactgtctcttgatctaggtggcaatagctatctccatggacaaatcccttatcaacttggaaaccttacacatttacaatatcttgatctaagttataattatctggatggggaactcccttatcaacttggaaatctctcacagttgaggtatcttgatcttggtggaaattcattctcgggagcagtccctttccaagctgggaatcttcctttgttgcacactcttggacttggtggcaattttgatgtgaaatctaaggatgcagagtggttgactaatctttcttccttgacaaaacttgagctaagttcactacacaacctttcctcttctcatcactggctacaaatgatcagcaagcttattccaaacttaagagagttgagactatttgattgttctctttcagatacaaatattcaatctctgttttattcaccttccaacttttccactgctcttaccatccttgatctttcttcaaataagctcacatcctcaacatttcaactgttgtcaaactttagccttaatcttcaggagctttatcttggtgataataacattgttttgtcatctcctctctgcccaaactttccggctcttgttatccttgacctttcctataataatatgtcatcatcagtctttcaaggtggtttcaacttcagctcaaaacttcaaaatcttgatttgcataattgtagtcttacggatgaaagttttcttatgtcatcttctttcattatgagttcttcatcttctcttgtttcccttgatctctcctcaaatctgttgaaatcatcaactatattttactggctctttaactccaccaccaatcttcataagctttccctttatcataacatgttggaaggtcccattccagatggatttgggaaagtaatgaactctcttgaagttctttacctctacggtaacaaactgcaaggcgagattccatctttctttggtaacatagacatatttaaggagttggatttatcttataaccggttgactggcatgttacctaaaagcattggatttctatcagagttggagtatcttatcttggctgggaattctttggagggtgacgtcactgaatcccatctttctaatttttccaaattaagatacttgtacttatcagagagctcgttgtctctgaaatttgtcccgagttgggttcctccattccaattagaatcattgggaatcagatcttgcaagttttggaataacttgcaaaatatgggattgttaaatatgtcttccaattatctcattggtgcaattcctaatatatcattgaagcttcctaacagaccgtctatacttctgaattccaatcagtttgagggtaaaattccgtcatttttactacaagcttccgagctgatgctctctgaaaataatttttcagatttgttttcattcttatgtgaccaaagcacagcttcaaatttgggcactttagatgtgtcacacaatcaaataaaggggcaactgccagattcaagcaataaattgtcagggaagattcctatgtccatgggcgcccttgttaatatggaagtcttggttttacgaaacaatggtttaatgggtgagttgccttcttctttgaagaattgcagcagtttaattatgctggacctgagtgaaaatatgttgtcgggtccaataccatcatggattggagaaagtatgcatcaattgataatcttgaacatgcgaggaaatcacctctccggaaatctacccattcatctctgttatttgaaccgtattcaattgttggatctttcaaggaataatttgtcaagcggaattccatcatgcttaaat

SEQ ID NO: 692 - DNA, 2349 bp, Glycine max; identical to SEQ ID NO: 691

SEQ ID NO: 693 - DNA, 1392 bp, Glycine max
atgggttggtacaatggtccttgtggcagccatcatgcacaacaatgcaaattccctgacttggtaaaaaaggctaggaaggaattcgtaaaaaccactgaatcaaattcttttgtaacatttggaaatatgtcagtgagattttcaaaacaccaaacagttatagtatcaaatgttgtatcttcaaatttggcttctttctacgaaataaaattgcaaaaacggaagaccgagagcttaattagacatagactgcccaactgttgggaacatctaaatacattagaatttcttgatctgagcaataataaattgtcaggcaagattccacagtccatgggtacacttgttaatttggaagctttggtcttaagacacaacaattttattggagacctaccattcaccttgaagaactgcactcgtttagatatactagacttgagtgaaaatttgttgtctggtccaataccgtcatggattggacaaagtttacaacaattacaaatcttgagcttgagtgtaaaccactttaatggaagtgttcctgttcatctctgttatttgaggcaaattcatatcttggatctttcaagaaataacttgtcaaaaggaattccaacttgtctaaggaactatactgcgatgatggaaagcagagtaatcacaagtcaaattgtaatggggcgaagaatatcatctacatcaatctcccctctcatttatgactctaatgtgttattgatgtggaaaggtcaggatcatatgtattggaatccagagaatcttctaaagagcattgatctctcaagtaatgatttaacaggtgaagtaccaaaagagcttggatatttacttggattggtatctttgaatttatcaagaaacaacttacatggacaaattccttctgagattgggaatttaaattcgttagaatttcttgacttatcaagaaatcatatctcaggaaaaattccatctactctttccaaaattgaccgtcttgctgtcttagacttatcaaacaacgatctcaatggaagaatcccttggggaagacagttgcaaacctttgatggctctagttttgaaggaaatacgaatctttgtggtcaacaacttaacaaaagttgtcctggagataagccaatagggacgcctgaaggagaagcagttgatggtgaagatgaagattcaatattctatggagcattatatatgagcttgggcctaggattcttcacaggcttttggggcttattagggccaatactactttggaaaccatggagaattgcttaccaaagattcttgatcagactcacagactatatacttctaatggtggaagtgaacatggccaagtgccatatgtggttcaaaggctag

SEQ ID NO: 694 - DNA, 1630 bp, Glycine max
atgggttggtacaatggtccttgtggcagccatcatgcacaacaatgcaaattccctgacttggtaaaaaaggctaggaaggaattcgtaaaaaccactgaatcaaattcttttgtaacatttggaaatatgtcagtgagattttcaaaacaccaaacagttatagtatcaaatgttgtatcttcaaatttggcttctttctacgaaataaaattgcaaaaacggaagaccgagagcttaattagacatagactgcccaactgttgggaacatctaaatacattagaatttcttgatctgagcaataataaattgtcaggcaagattccacagtccatgggtacacttgttaatttggaagctttggtcttaagacacaacaattttattggagacctaccattcaccttgaagaactgcactcgtttagatatactagacttgagtgaaaatttgttgtctggtccaataccgtcatggattggacaaagtttacaacaattacaaatcttgagcttgagtgtaaaccactttaatggaagtgttcctgttcatctctgttatttgaggcaaattcatatcttggatctttcaagaaataacttgtcaaaaggaattccaacttgtctaaggaactatactgcgatgatggaaagcagagtaatcacaagtcaaattgtaatggggcgaagaatatcatctacatcaatctcccctctcatttatgactctaatgtgttattgatgtggaaaggtcaggatcatatgtattggaatccagagaatcttctaaagagcattgatctctcaagtaatgatttaacaggtgaagtaccaaaagagcttggatatttacttggattggtatctttgaatttatcaagaaacaacttacatggacaaattccttctgagattgggaatttaaattcgttagaatttcttgacttatcaagaaatcatatctcaggaaaaattccatctactctttccaaaattgaccgtcttgctgtcttagacttatcaaacaacgatctcaatggaagaatcccttggggaagacagttgcaaacctttgatggctctagttttgaaggaaatacgaatctttgtggtcaacaacttaacaaaagttgtcctggagataagccaatagggacgcctgaaggagaagcagttgatggtgaagatgaagattcaatattctatggagcattatatatgagcttgggcctaggattcttcacaggcttttggggcttattagggccaatactactttggaaaccatggagaattgcttaccaaagattcttgatcagactcacagactatatacttctaatggtggaagtgaacatggccaagtgccatatgtggttcaaaggctagtagtttatggcgtattagcttcaaaatttcaatccggggtgaaagcttcatgaatagctgaaggtttacgatatgtactatgtagtattgatcgatgtttgctatgcaatgcaaaataagtgtttggaaaaacctattgattttgattgtctttttattgtataatctcttttcaagaatgccagatatcaaaattatgtttgttgatcaggctagtatgttccgactacttatttaa

SEQ ID NO: 695 - DNA, 1199 bp, Glycine max
tacacttgtgtcgatcagctctaaaaaaaaaacaccttttttctatatttgcgttgcatgatcatgaattcctcctccatttatattcttgtctttgtccagctttggttgttcagcttcccatgcagagagagtgtgtgcatcccaagtgagcgtgagacacttttgaagtttaagaataatctgaatgatccttcaaataggctttggtcttggaatcataatcataccaactgttgccactggtatggagtcctctgccacaacgtcacttcccatcttcttcagcttcacctcaacacttcacctcctgctttcgatgattgggaagcatttgaagcttatcggagatggagctttggtggagagataagtccttgtttggctgatttaaagcatttgaattacttggacttgagcggcaattatttacttggagaaggtacgtcaattccttctttccttgggacaatgacttccttgactcacctcaacctctcttatactggattccatgggaagattccatctcagattggcaatctctctaagcttcgatatcttgacttgagcttcaattatttagttggagaagggcagagattaatataaagccatggcatattttgttgggagggttgaaagaagacactacgaggataccatggctgaacagagagccttatgcttactggaaaggtaatccagctgttgctgaaaccagacaagatctcatgaaatgcaatgtttatgaaaatcaagattggaatgctcgtttatttgcccagataataacagaatttgaggataacagaatttgggaaaagcactatctctgtcccctaactaactgcagtgcactaatgctgtcgcggctaaacctaatccctgaggtgagtgggtctgtagtgtggagaagaaatcagcttgttgctccaattgattaatgttgtagaaaaaaggtgactgagaaggatcaagttttctcagggtatcttctttttttgtatttgaaaaaacacaaatgacatgaggaacagtcgttaccttctgctacattttcttttttattatggaagacaagaggcagatctttagcctctctctctctctctctttttttaacaatttgtagtcctggctttcgtatactgattcttagattcatacatgcattcggatgttggagcttggtctta

SEQ ID NO: 696 - DNA, 2724 bp, Glycine max
atggcaattccttctttcctctggacaatcacttccttgactcacctcgacctttctggtactggattcatggggaagattccatctcagatttggaatctctccaatttggtgtatcttgacctgacgtatgccgccaatggaacaattccatctcagattgggaatctctccaatttggtgtatcttggccttggaggtcattctgttgtcgaaaatgtagaatggctatcaagtatgtggaagcttgaatatctttatttgactaatgcaaacctatccaaagcatttcattggctacacactctccaatctcttccttctttgacccacctatatttgttagactgcacactccctcactataatgaaccatccttgctcaacttctcatctctgcaaactctccatctttcctacactagttattcccctgccatctcttttgtccccaagtggatattcaaattgaagaaacttgtttctcttcaattacatggtaatgaaatccaaggtccgattccttgtggtattcgaaacctcacacttcttcaaaatcttgacttgtctttcaattcattctcatcttctatacctgattgcttatacggtcttcatcgtctcaagtctttggacctaagatccagcaacttgcatgggactatttctgatgccttgggaaatttgacttctcttgttgaacttgatttatcaggtactcaacttgaaggaaacattccaacttctttgggtgatttgacttctcttgttgaacttgatttgtcatatagtcaacttgaaggaaacattccaacttctttgggtaatctctgcaacttaagggtgatagatttatcatatctcaaactcaaccaacaggttaatgaacttttagaaattcttgctccttgtatttcccatggactcacaagacttgcagttcagagttcacgactttcaggcaatctgacagatcatattggggcatttaaaaatattgagctgctagatttttcctacaactcaattggtggtgctcttcctagatcatttggaaaactttcatcattaagatatctcgatctctctatgaataaaatcagtggaaatccatttgaaagtcttggatcactctctaaattgttatctcttgatattgacggcaatctttttcacggagttgtcaaggaagatgatcttgcaaatcttacaagcttgacggagtttggtgcatcggggaacaatttcactttaaaagtgggtcccaattggattcctaattttcaacttacctatttggaagtgacatcatggcagttaggtcccagctttccattgtggattcagtcacaaaaccaacttgaatatgttggactatctaacacggggattttcggttctattcccacacagatgtgggaagcactttctcaggtttcgtatttaaacctctcacgtaatcatatccatggtgagattgggactacattaaagaatccaatatctatcccaactattgatctaagctcaaatcacttgtgtggtaaattaccctatctttcaagtgatgtgtttcagttagatctttcaagcaattcattctctgaatccatgcaagattttttatgtaacaatcaggacaagccaatgcaattacaatttctgaatcttgcatcaaatagtttgtcaggagagatacctgattgctggatgaattggacacttctggtggatgtaaatttacaaagcaaccattttgttgggaacttaccgcaatccatgggttccttggcagagctgcagtctttacaaattcgtaacaacacactctctggaatatttccaaccagtttgaagaagaataaccaattgatatccttggaccttggggaaaataatctttcaggaactattccaacatgggttggagaaaacctcttaaatgtgaaaatcctccgccttcgatcaaacagttttgccggccacattccaaatgaaatatgtcagatgagtgatcttcaggttttagaccttgcacaaaacaatctgtctggcaatataccgagctgtttcagtaacttgagtgccatgacactaaagaaccaaattagtgtgctactatggctgaaaggaagaggagatgagtacagaaacattctgggtttggtaacaagcattgatctgtcaagtaacaagttattaggggaaataccaagagaaatcacatatctaaatggattgaattttttaaacatgtcccacaaccaattgattggtcatattccacaaggtataggtaatatgagatcattacagtccattgatttttccaggaatcaactttctcgtgaaatccctccaagcattgcaaatttgagctttctgagcatgctagacttgtcttacaatcatttgaagggaaaaattccaacaggaactcaattgcaaacctttgatgcctccagcttcatcggcaacaatctatgtggtccaccactgcccataaactgcagctccaatgggaaaacccatagttatgaaggaagtgatgggcatggagtgaattggttttttgtcagtatgacaattggatttattgtgggattctggatagtgattgctcctttgctgatttgtagatcatggcggtatgcctattttcatttccttgatcatgtgtggttcaaacttcaatcttttcgcttaggtagtatcactgtttag

SEQ ID NO: 697 - DNA, 2706 bp, Glycine max
atggcagtgctatttgcaactcatgttcttctcttgatattgtccactgctacaactctccacttcagtgcaagcaaggcagcaaggctcaatatgacttgcagcgagaaggaaaggaatgcactcctcagcttcaagcatggactagcagaaccttcaaacaggctttcatcgtggtctgacaaatcggattgctgtacatggccaggggttcactgcaacaacacaggtaaagtcatggaaatcaatcttgacacacctgcgggctctccctatagggagttgagtggagagattagtccttctttgcttgaactaaaatatttgaatcgtttggacttgagttcaaattattttgttcttactccaataccaagcttcctaggctcattggagagtctgagatacttggaccttagcttaagtgggttcatgggattaatccctcatcaactaggaaacctctcaaacctgcagcaccttaatcttggatacaattatgctcttcagatagataaccttaattggatatcaaggctatcttccttcgagtaccttgatttgagtggttcagaccttcataaaaaaggtaactggcttcaagtactgagtgcacttccatctctttcagaactacacttggagagctgtcaaattgataacttaggaccaccaaaacgaaaagccaacttcacacatctccaagtccttgatctttcaattaacaatctcaatcagcaaatcccttcatggctatttaatctcagcacaactcttgtccaacttgatttacacagtaaccttttacagggacaaattccacaaataatatcaagccttcagaacataaaaaatctagacctgcagaacaaccagctcagtgggccacttccagattcattaggccagcttaagcatcttgaagttctaaatctcagtaataatacctttacttgtccaattccctcaccatttgcaaacttgtcatccttgagaactttaaacctggctcacaaccgactgaatggaaccattcctaagagttttgagttcctcagaaacctgcaggtattaaatcttggaactaattctttgactggtgatatgcctgtaactcttggaactctctcaaatttagtaatgttagacctttcatctaatttgttagaaggatctataaaagagtcaaattttgtaaaacttttgaaattaaaggaactacgtttgtcttggacaaacttgttcctcagtgtcaactcaggatgggttcctccttttcagcttgaatatgttttactgagctcctttggaataggtcctaagtttccagaatggctaaaaaggcaaagttctgtgaaggttttgacaatgtctaaggcaggtatcgcagacttggttccaagttggttttggaattggacttcgcaaattgaattcctggatctgtcaaacaatctgttaagtggagacctatctaacatctttctcaattgcagcgtcataaatttgagttctaatttgttcaagggtacattgccaagtgtgtctgcaaatgttgaagtgctgaatgttgccaataactcaatttccggaacaatttctccctttttatgtggaaaggaaaatgctactaataagttaagtgtgcttgatttttcaaataatgtattatatggtgatcttggtcactgttgggtgcattggcaagcattggtgcatttgaacttgggtagtaacaatttgtctggtgttattccaaactccatggggtatctatctcaacttgagtctttgttgttagacgacaaccgcttctctggatatattccttcaacactgcaaaattgctctacaatgaaattcattgacatgggcaataaccaactttctgacgcaataccagattggatgtgggaaatgcaatatctaatggttcttcgtctaagatccaacaatttcaatggcagcattactgaaaagatttgtcaactttcttcccttatagtgctggatcttggcaataacagcctgtcaggatccattccaaattgtttggatgacatgaaaacaatggctggtgaagatgacttctttgcaaacccttcaagttattcatatggctctgacttcagttataaccactacaaggaaactcttgtcttagttcccaaaggagatgagttagagtacagagacaatttgatattggtgagaatgattgatctttcaagtaataagctgtctggagcaattccatctgaaatttccaagctatctgctttgcggtttttgaacttgtctagaaatcatctgtctggagggataccaaatgacatgggaaaaatgaaattgttagaatcccttgatctctcactaaacaacatttcaggtcaaatccctcaaagtttatctgatttgtccttcctcagtgtcctgaatctatcatacaacaacttatcaggcagaattcccacgagcacccaacttcagagctttgaagaacttagctacactggaaatcctgagctttgtgagttttatatgggtatgggagttggatttgcagcaggattttgggggttttgcagtgttgttttcttcaacagaacttggaggcgtgcttattttcattatcttgaccacttgagagatctgatttatgtgataatagttttgaaggtaagaaggttacttgggaaattgtga

SEQ ID NO: 698 - DNA, 576 bp, Glycine max
atggattcaaatgcttgtctaccacacttgctagtgttagcagtaacattggtattggttagttatgcaatgggagattcagctcaagacaaacagagatgtgcagaatccctggcaggtgcagcaacgtgtctgccatatttgggtggtgacacgaaagcacccacagcagattgttgcagtcgtctcacacaagctatgaagaccaacaagaagtgtgtctgccttattctcaaagacagggatgatcctgatcttggcttaaagattaacatgacaattgctgttggtctcccttctctttgcaaaacacctgataatctctcacagtgttctgcacttctgcacttggatcctaaatcacctgaagctcaagcttttaatcaaattggtcagaaatccaatggtggttctatcagtccttcgcccactccttctgttgaaggaagttcccagaatggtagaaaccaggggacagatgaaacggccacagctaagaatagtgcatcttatatcgggaagagattgttagaaagtttggttgcagttgcagggcttctaatttggctttcatga

SEQ ID NO: 699 - DNA, 952 bp, Glycine max
ttacatgtagcaccacaacttaacaatttctacctacaaccctgctctgtatactcattttaaacttgttccatagactataatataatctatctccactcattctttcatcaagagtgaaaaatggattcaaatgcttgtctaccacacttgctagtgttagcagtaacattggtattggttagttatgcaatgggagattcagctcaagacaaacagagatgtgcagaatccctggcaggtgcagcaacgtgtctgccatatttgggtggtgacacgaaagcacccacagcagattgttgcagtcgtctcacacaagctatgaagaccaacaagaagtgtgtctgccttattctcaaagacagggatgatcctgatcttggcttaaagattaacatgacaattgctgttggtctcccttctctttgcaaaacacctgataatctctcacagtgttctgcacttctgcacttggatcctaaatcacctgaagctcaagcttttaatcaaattggtcagaaatccaatggtggttctatcagtccttcgcccactccttctgttgaaggaagttcccagaatggtagaaaccaggggacagatgaaacggccacagctaagaatagtgcatcttatatcgggaagagattgttagaaagtttggttgcagttgcagggcttctaatttggctttcatgagcattactcaaatactacctatatattaccattttcatatcacgttgaaatgtaaaccattgatgagttgatagtgcaaaaatatttacactcttgagtgtattaaatctctgacagactcacaatagatattattgcaaaaccttattggagatttatttttgtcagcatttttaatctcatacaactatatgcttgttacacaaatcttattgttcagtcctaaaagtcttttatctctaataagaaataa

SEQ ID NO: 700 - DNA, 417 bp, Glycine max
atgtctaatatgatagaggtgagagttccaaatcttgattgtgaaggatgtgcttcaaaattaaagaaagctctcttcaagctcaaaggagtagatgaggtggaagttgaaatggaagcacaaaaaataacagtgaggggctatggtttggaggaaaagaaggttcttaaggcaatcaaacgtgcagggaaagcagcagaaccatggccatttccagggcatgctcatttttcctcattttacaagtaccctagttacattgttaaccattactatgatgcatacaaaagtgaagctaccaatggagtccacactttcttccacacccctgcagtgtattcagttgctgtggcatctgatgaagcctttgcttctctctttagtgatgataacccacatgcttgcactataatgtaa

SEQ ID NO: 701 - DNA, 2864 bp, Glycine max
cagtgtacaaacaatttcctattcattcaatcatggattcaagagcagttcaaactcattcgcatgaacatcaccataattctcacaatgttgggtcacacgcagtggcacatggtgaagaacaacaccaccatgaccatgagaagaagtcggttctgaagaaagtcaagcaaaaggctaagaaaattaaggacacaatcacaaagcatggccatcatgaccatgaacatgaacatggtcatgagtatcaccttgatgatcaacatatccctgatgatcatgacttggaagaggaagatgagatggatgaatacccagaagtccatggagcaccgatttatgacagtgccgctgttagaggtgcagcaccagggcatgccaatactttagggaggcctggagttaattttggaggcacaacagttatgggagtagaacctcttcacgagctaagagttgtagttgtttctccaactactgaaattaatcaaaacagaaccactgacccaactagaacatttgttgagggagagaaagcagtgcatcgtaaggtcaatttggagagaccaatgtacttggaggaagatccacatgcgccaagaagtacatctcaagcatatgctccagccaattatcaaaccaaagtcactgatcctaccggggcaggtggggcagaaattgacattacccctgttgagaaatctttctctaggatggctgttcacaatgagccaaaaccatacccagaaccaaaactcttttcaactgttcctgaaactcactacccttctgctggaagccactcccaacttgcaccagagctatcttctgcaactaactacccaactaactacccatctgctcaaagctatggtcagtacatgccagaactatctagtgaagttaaaactcagtaccccaaaagccataatcagtttatgccagagttatctacaccaaccaaaactccctacccttccaccaatatccatgaccaacacttaccacaacaatctagtgcaacaaaaactcaataccctttatctggaagtcatgacaagtttgcaccagtgttatctactgaacctaacattcagtacccttcaaccaaaatccatgaccaagacttgcctcagcagtttactgcaacaaaaactcaatacccttcatctggaagccatgatcagttaacaccagaattatctttctctactgaacctaaccttcagtacacttcaacaaaaatccatgaccaacacttgccacaacaatttagtacaaatgcaacacatactatatgtccttcagctggaagtcatgatcaatttctaccagaatatccaactcaaaccaaaaccccacaaacctataccaccacccaagttgaggaaccacactatgaaccatcaaacgagagcagttacacagataaaatctcctccgcaaccacagcaatagctgacaaagccatcactgccaaaaatgttgtagcttcaaagctcggatacggtgatgacaccaccgaaaaaactcaaacaaatcataaagaagagaacacaagcaatgaaaaaccgtcaacaatcacatcagcaacctcagccaaaaacactgtctcttcggatcaccaagagaacacaggcagtgcaaagccatcaacaatctcttcagcaacctctgcaatagctgataaagccatatcagccaaaaacacagtctcttccaagctcggatacgctgacaacaacaccgaaacaactcaagcaagccatcaagagaacacacaaccatcaacaatctctttagcaacagctgcaatagccgataaagccgtctcagcaaaaaacaccgtagcttccaagctcggatatggcgacaacactgaaacaaaaacaactcaaaccactcaaacaaggaatcaattaaagaacacaggcaatgagaaaccttcaacaatctcatcagcaacctctgcaatagctgataaagctgtctcagccaaaaacaccgtagcttcgaagcttggttttggcgacacagcaacaacaacacaacaagagaagagaactgaccatgctgctgctcctacagaatatggaaaaagtgttgctcagtccctgacagagaaactagctccagtttctggaaaagatgctggtgtaggaagtggtgtgaagtccaaagtttctggaactcaaactagtagtatgggtgtggaacaggacaagggggtttctgtgaaggactatttggtggacaaactgaggcgtggtgatgaagacagggctctctctgaagtgatatcagagactctgcacaagaaggaactgccctcagtggaagttactgaagaaggtgtgagaaaggtggtttctgatgctgtgcataagagagaggatgatcctgagagaagaatggaacatcaaagaatactgggaaaggtaactgagtcagaggaagtgaagagaaggttaggaggtgaaagtgtggtgacagagaaaaagtaccaagagatgtatgtgaatagtccaggtaaaggtgtggttgataaggttaaaggtgtggttgggacatggtttaccaacccagcagagaatcaatcttcacaagattcatctatgaattatgaggcaggaagggcagaagtggaacaagctaaccaaggtgcagcaggtgaaagaaggctgcaggagtcatctaattgaagaggtgctttgaaggagtctttgctttgggtgattgtgtagattttcttaaaagctgtttctatatctgtgtgtcttcttctttgttggaagaaagttaggatgctcaagtcacagtaaaataaaaaatttgtgttttttttaatgtttatgtaaatatcc

SEQ ID NO: 702 - DNA, 968 bp, Glycine max
ggcagagattaatataaagccatggcatattttgttgggagagttgaaagaaggcactacgaggataccatggctgaacagagagccttatgcttactggaaaggtaatccagctgttgctcaaaccagataatatctcatggaatgcaatgtttctgaaaatcaagattggaatgctcgtttattggcccagaaaaaaggttaaaaagaaaagaaaagtgagtgggaaagacacactcgagtcgagcgggagtcaaagctggaagtccaaagtttctggaaatcaaactagtagtgtgggtgtggaacaggacaagggggtttctgtgaaggactatttggtggacaaactgaggcctggtgatgaagacggggctctctctgaagtgatatcagagactctgcacaagaaggaactgcccccagtggaagttactgaagaaggtgtgagaaaggtggtttctgatgctgtgcataagagagaggataatcctgagagaagaatggaacatcaaagaatactgggaaaggtaactgagtcagaggaagtgaagagaaggttaggaggtgaaagtgtggtgacagagaaaaagtaccaagagatgtatgtgaatagtccggggaaaggtgtggttgataagtttaaaggtatggttgggacatggtttaccaacccagcagagaatcaatcttcacaagattcatctatgaattatgaggcaggaagggcagaagtggaacaagttaaccaaggtgcagcaggtgaaagaaggcagcaggagtcatctaattgaagaagtgctttgaaggagtctttgctttgggtgattgtgtagattttcttaaaagctgtttcaatatctgtgtgtctagttctttgttggaagaaagttaggatgttcaagtcacagtaaactaaaaatttgtgtttttttttaatgtttatgtaaatatccaattttattcgg

SEQ ID NO: 703 - DNA, 679 bp, Glycine max
tggctgaacagagagccttatgcttactggaaaggtaatccagctgttgctcaaaccagacaagatctcaagaaatgcaatgtttatgaaaatcaagattggaatgctcgtttatttgcccaggattggtttcgagaatcacaagaggggttcaacaaatcagacttgccaagtcaatgcacttatagatataaggtgtacattgaaggttctgtttggtcagtcagtcaaaaatacattctgtcatgtgactctaccactctacgtgtacgactacatgtttcatctcctgaattcatatgctaaactcttcagatacaaaccctccataagtgctaatgctacagaactatgtgtggagtcaatggtttgtggagcagaaggatcagtaaagaaatttatgatggaatcattggtcaaggttcctgcaaataccgacccttgcaccatgcctgccccttttgaccctccaactttgtatgcaacattagagagaaaggaaagctcaattcaacaagttgaatcatgggagaaaagttattgggataatcaaaccataacatcttaatgaatatttgtttttccatattcaacttaactcattcattcttagactatcttggaaggatacaagtagaatctagattatcttgtacttggctaaagaaaccatatcatg

SEQ ID NO: 704 - DNA, 1554 bp, Glycine max
atgtggatctctcagcaagaaaactcttcaagttggttcttcctcccagttgttaccttcatcatcctctttcttttacgtactttcctcaatcttttatccaaccggaacaatgattccaaaaaaccctcaccaccatctcctccaaagcttccaataataggaaacctccatcaacttggtacccacattcaccgcagtctccaatccttagctcaaacctatggttctttaatgctacttcacttaggaaaagtgccagtccttgttgtctcaacagctgaggcagctcgtgaagttttgaaaacacatgaccccgttttctccaacaaaccacatcgtaagatgtttgatatcctcttgtatggttccaaagatgtggcatctgctccatatggcaactactggaggcagacaaggagtatccttgttttgcatcttctcagtgccaaaaaggttcaatccttcgaggcagtgagagaagaggaaatctccataatgatggaaaatattaggaagtgttgtgcatcattgatgcctgtggatttaactggcttattttgtatagtggccaatgatatagtgtgtagagctgctcttggaagaagatacagtggagaaggagggagtaagcttcgcgggccgatcaacgagatggcggagctgatgggtactccggttttaggagactatttaccttggcttgattggttggggagagttaatgggatgtatggtagggcagagagagcggctaaaaaggttgatgaattctttgatgaagttgttgatgagcatgttaataagggaggccatgatgggcatggtgatggtgtcaatgatgaagaccagaatgatttggtggacattttgttgaggatccaaaagacaaacgccatgggatttgagattgatagaacaaccataaaggctttgatactggatatgtttggtgcaggtactgaaactacctccacaattctagagtggataatgacagaactcttaaggcatccaatagtgatgcaaaagctacaaggtgaggtcaggaatgtggttagagatagaacccacatatccgaagaggatttgagtaatatgcattacttgaaggcagtgattaaagaaacttttcgattacatcccccaattaccatattggccccaagggaatccacgcaaaatactaaggtgatgggctatgacattgcagctggcacgcaagtaatggttaatgcttgggcaattgcaagagatccttcatattgggaccagcctgaagagtttcagccagaaaggttcctaaatagttcaattgatgtcaaaggacatgatttccaactgctcccatttggagcaggaaggagggcttgcccaggattaacattttccatggttgtagttgagctggtaatagcaaaccttgttcaccaatttaattgggcaatacctaaaggagtggtgggggatcagacaatggacataactgaaactactgggttatccattcatagaaaatttcctcttatagcaattgcatccccacatgcataa

SEQ ID NO: 705 - DNA, 1888 bp, Glycine max
attgcatcatctatcaactgagaaacccaatgtggatctctcagcaagaaaactcttcaagttggttcttcctcccagttgttaccttcatcatcctctttcttttacgtactttcctcaatcttttatccaaccggaacaatgattccaaaaaaccctcaccaccatctcctccaaagcttccaataataggaaacctccatcaacttggtacccacattcaccgcagtctccaatccttagctcaaacctatggttctttaatgctacttcacttaggaaaagtgccagtccttgttgtctcaacagctgaggcagctcgtgaagttttgaaaacacatgaccccgttttctccaacaaaccacatcgtaagatgtttgatatcctcttgtatggttccaaagatgtggcatctgctccatatggcaactactggaggcagacaaggagtatccttgttttgcatcttctcagtgccaaaaaggttcaatccttcgaggcagtgagagaagaggaaatctccataatgatggaaaatattaggaagtgttgtgcatcattgatgcctgtggatttaactggcttattttgtatagtggccaatgatatagtgtgtagagctgctcttggaagaagatacagtggagaaggagggagtaagcttcgcgggccgatcaacgagatggcggagctgatgggtactccggttttaggagactatttaccttggcttgattggttggggagagttaatgggatgtatggtagggcagagagagcggctaaaaaggttgatgaattctttgatgaagttgttgatgagcatgttaataagggaggccatgatgggcatggtgatggtgtcaatgatgaagaccagaatgatttggtggacattttgttgaggatccaaaagacaaacgccatgggatttgagattgatagaacaaccataaaggctttgatactggatatgtttggtgcaggtactgaaactacctccacaattctagagtggataatgacagaactcttaaggcatccaatagtgatgcaaaagctacaaggtgaggtcaggaatgtggttagagatagaacccacatatccgaagaggatttgagtaatatgcattacttgaaggcagtgattaaagaaacttttcgattacatcccccaattaccatattggccccaagggaatccacgcaaaatactaaggtgatgggctatgacattgcagctggcacgcaagtaatggttaatgcttgggcaattgcaagagatccttcatattgggaccagcctgaagagtttcagccagaaaggttcctaaatagttcaattgatgtcaaaggacatgatttccaactgctcccatttggagcaggaaggagggcttgcccaggattaacattttccatggttgtagttgagctggtaatagcaaaccttgttcaccaatttaattgggcaatacctaaaggagtggtgggggatcagacaatggacataactgaaactactgggttatccattcatagaaaatttcctcttatagcaattgcatccccacatgcataagaagcgttttttttttatcagtggtggaaataagaagccatgaatattaaagatatacaagaggaaatacctgaaaagaaaaataagggagtattctctcgttaatgtatcattaaaataacttatggccaagagtgccttcatagtataatctatggttaatgatagttgaactgcattggttggtttatttagttatggttattcaattattgtatttttgacattcaattgtactttgagatctctattatacgtatgaaattaatgtttaatcaagagacctttataatttccctttccaa

SEQ ID NO: 706 - DNA, 1758 bp, Glycine max
atgccatctttctcattcttaagaacactcaggctctctctttttccgccttataccccaattgcaattccaactgcaaccctccattctcaatctcattctcaacctcactctcaccatcatcaccatgatgctgttgcctcattcaatcgcatgcttcttatgcgccctcccccacccaccttcctttttaacaacattctgagttcccttgtcaagaacaagcgttatcccactgtcatctccctttttaaacaattcgagccaaatgggattacacctgacctttgtactctgagtatcctcatcaattgtttctgccatctgactcacatcacttttgctttttctgtattcgccaacattctcaagaggggttatcatccaaatgcaattaccctcaacacactcatcaaaggcctctgtttttgtggggagattaaaagagcactgcactttcacgataaggtcgtagctcaagggttccagttggaccaagtcagttatgggacattgatcaatggtttgtgcaaagcaggagagacaaaggctgtcgcacggttactgaggaagctggaaggacactcggttaaacctgatttggtaatgtacactacaataattcattgcttatgcaaaaataaactcctaggagatgcctgtgatttgtactctgagatgattgttaagggaatttccccgaatgttttcacctacactactctgatccatggcttttgcatcatgggtaatttgaaagaagcattttccttgttgaatgaaatgaaattgaaaaacatcaacccggatgtttatacctttaacatattgattgatgcattagcaaaggaaggtaagatgaaagaagcattttccttgacgaatgaaatgaaattgaaaaacatcaacccagatgtttatacctttagcatattgattgatgcattaggcaaggaaggtaagatgaaagaagcattttccttgttgaatgaaatgaaattgaaaaacatcaaccccagtgtttgtacctttaacatattgattgatgcattaggcaaggaaggtaagatgaaagaagctaaaattgtgttagctatgatgatgaaagcatgtattaagcctaatgttgttacttataattctctaatagatggatacttcttggttaatgaagtaaaacacgcaaagtatgtattccattctatggctcaaaggggagtgacacctgatgttcagtgttatactatcatgattgatgggttatgtaagaaaaaaatggtagatgaagctatgagtctctttgaagaaatgaaacacaaaaatatgtttcctaatattgtgacttatacttctcttattgatggtctgtgcaaaaatcatcatctagagagggcaattgcattatgcaagaaaatgaaagagcagggaattcagccaaatgtatactcatacacaatacttcttgatgcactgtgcaagggtggaagacttgagaatgcaaagcagtttttccagcatcttttggttaaaggctatcatctgaatgttcggacatataatgttatgatcaatgggctttgtaaagcgggcctgtttggtgatgtgatggatttgaagtcaaaaatggaaggcaaaggttgcatgcccaatgctataacttttaaaacaattatttgtgccctacttgaaaaagatgaaaatgataaggcagagaaattcctccgagaaatgattgctagaggcctactgaaagtgtaa

SEQ ID NO: 707 - DNA, 2348 bp, Glycine max
cgccgacccagagtttcatccttcatctattttctatactctctttccttttccatttccaatgccatctttctcattcttaagaacactcaggctctctctttttccgccttataccccaattgcaattccaactgcaaccctccattctcaatctcattctcaacctcactctcaccatcatcaccatgatgctgttgcctcattcaatcgcatgcttcttatgcgccctcccccacccaccttcctttttaacaacattctgagttcccttgtcaagaacaagcgttatcccactgtcatctccctttttaaacaattcgagccaaatgggattacacctgacctttgtactctgagtatcctcatcaattgtttctgccatctgactcacatcacttttgctttttctgtattcgccaacattctcaagaggggttatcatccaaatgcaattaccctcaacacactcatcaaaggcctctgtttttgtggggagattaaaagagcactgcactttcacgataaggtcgtagctcaagggttccagttggaccaagtcagttatgggacattgatcaatggtttgtgcaaagcaggagagacaaaggctgtcgcacggttactgaggaagctggaaggacactcggttaaacctgatttggtaatgtacactacaataattcattgcttatgcaaaaataaactcctaggagatgcctgtgatttgtactctgagatgattgttaagggaatttccccgaatgttttcacctacactactctgatccatggcttttgcatcatgggtaatttgaaagaagcattttccttgttgaatgaaatgaaattgaaaaacatcaacccggatgtttatacctttaacatattgattgatgcattagcaaaggaaggtaagatgaaagaagcattttccttgacgaatgaaatgaaattgaaaaacatcaacccagatgtttatacctttagcatattgattgatgcattaggcaaggaaggtaagatgaaagaagcattttccttgttgaatgaaatgaaattgaaaaacatcaaccccagtgtttgtacctttaacatattgattgatgcattaggcaaggaaggtaagatgaaagaagctaaaattgtgttagctatgatgatgaaagcatgtattaagcctaatgttgttacttataattctctaatagatggatacttcttggttaatgaagtaaaacacgcaaagtatgtattccattctatggctcaaaggggagtgacacctgatgttcagtgttatactatcatgattgatgggttatgtaagaaaaaaatggtagatgaagctatgagtctctttgaagaaatgaaacacaaaaatatgtttcctaatattgtgacttatacttctcttattgatggtctgtgcaaaaatcatcatctagagagggcaattgcattatgcaagaaaatgaaagagcagggaattcagccaaatgtatactcatacacaatacttcttgatgcactgtgcaagggtggaagacttgagaatgcaaagcagtttttccagcatcttttggttaaaggctatcatctgaatgttcggacatataatgttatgatcaatgggctttgtaaagcgggcctgtttggtgatgtgatggatttgaagtcaaaaatggaaggcaaaggttgcatgcccaatgctataacttttaaaacaattatttgtgccctacttgaaaaagatgaaaatgataaggcagagaaattcctccgagaaatgattgctagaggcctactgaaagtgtaaaactagatgcgatggtttccaattattattgaataaatagttcattcataacaacaaatattcaaccgttcattttttctgatttatatatactttttatacccattcccatttgcttatagatacaatcctgtacatatgactcaacttcactagtctacttgtggtatttttgtttgcattttccctttcaattttgatttgcatgtgagctttgggttaatttaccatcagtttactttcttctcttattttactaggatatttttttatcattctgcatgtgttcaacacatagttcaacaaatttttttaaagctttgccagtgcccacttcattttttttgtcagactctatcattgatatgatgaaaactgtgcattgtattgctttggcaatatcttataaaactacaagctgagtgtttgtatttggtacttgtttataaatgccatttctaggagcatagcattgaggatttgatggttaactttgcatatattcaataaccataatcagttgttgttt

SEQ ID NO: 708 - DNA, 639 bp, Glycine max
atggcatgtttttatgatgctgttgaggagcatgttggtaagaaatgccatgatgggcatgttgatgttgatgatggtgaagaccagaatgattttgtggacattttgctttcgattcaagagactaacaccacagatttccagattgatagaacattcgtcaagactttggtcatggacatagttaatgcttgggcaatttcaactgacccttcatattgggaccaacctctagagtttcaaccagggagattcttgaagagttcattggatatcaaaggacatgatttcgaattgatccgatttggagctagaagaaggggttgtccaggaataggctttgccatggctttgaatgaggtagtccttgcaaacattgtgcaccagttttattgggcagtgcctgaaaagtttgggcattgttattttctcgtgattagcacctcgaagaagtggatgagctcaacgacaatgaggttctcttttgagcgcaactacgaggttcccttcgagtgcaaacacaatggtaacatccaggttacctacgactacgagtgcaaaggcaaaatgtctcgttgccgatgcgagaagatagtgaactcttggtgtttggttactaagaaacggataaaaatatag

SEQ ID NO: 709 - DNA, 639 bp, Glycine max; identical to SEQ ID NO: 708

SEQ ID NO: 710 - DNA, 1752 bp, Glycine max
atgccatctttctctttcttaagaacattcaggctctctctttttccgccttatcccccaattgcaactgcaaccctccattctcaatctcattctcaacctcactctcaccatcatcaccatcatgctgttgcctcattcaatcgcatgcttcttatgcgccctcccccacccaccttccattttgacaacattctgagttcccttgtcaagaacaagcattatctcactgtcatttccctttttaaacaattccaatcaaatggggttacacctaacctttgtactctgaacatcctcataaactgtttttgccatctggctcacatcacttttgctttttctgtattcgccaacattctcaagaggggttatcatccggatgcaattaccctcaacacactcatcaaaggcctctgtttttgtggggagattaaaagagcactgtactttcacgataaggtcgtagctcaagggttccagttggaccaagtcagttatgggacattgatcaatggtttgtgcaaagcaggagagacaaaggctgtcgcacggttactgaggaagctggaaggacactcggttaaacctgatgtggtaatgtacactacaataattcattgcttatgcaaaaataaacgcgtaggagatgcctgtgatttgtactctgagatgattgttaagggaatttccccgaatgttttcacctacaatactctgatctatggcttttgcatcatgggtaatttgaaagaagcattttccttgttgaatgaaatgaaattgaaaaacatcaacccggatgtttatacctttaacatattgattgatgcattaggaaaggaaggtaagatgaaagaagcatcttccttgatgaatgaaatgatattgaaaaacatcaacccggatgtttatacctttaacatattgattgatgcattaggcaaggaaggtaagatgaaagaagcattttccttgttgaatgaaatgaaattgaaaaacatcaaccccagtgtttgtacctttaacatattgattgatgcattaggcaaggaaggtaagatgaaagaagctaaaattgtgttagctatgatgatgaaagcatgtattaagcctaatgttgttacttataattctctaatagatggatacttcttggttaatgaagtaaaacacgcaaagtatgtattccattctatggctcaaaggggagtgacacctgatgttcagtgctatactatcatgattaatgggttatgtaagaaaaaaatggtagatgaagctattagtctctttgaagaaatgaaacacaaaaatatgtttcctaatattgtgacttatacttcacttattgatggtctgtgcaaaaatcatcatctggagagggcaattgcattatgcaagaaaatgaaagagcagggaattcagccagatgtatactcatacacaatacttcttgatgcactgtgcaagggtggaagacttgagaatgcaaagcagtttttccagcatcttttggttaaaggctatcatctgaatgttcggacatataatgttatgatcaatgggctttgtaaagcgggcctgtttggtgatgtgatggatttgaagtcaaaaatggaaggcaaaggttgcatgcccgatgctataacttttaaaacaattatttgtgccctatttgaaaaagatgaaaatgataaggcagagaaattcctccgagaaatgattgctagaggcctactggaagtgtaa

SEQ ID NO: 711 - DNA, 3290 bp, Glycine max
gacccagagtttcatacttcatctattttctatactctctttccttttccatttccaatgccatctttctctttcttaagaacattcaggctctctctttttccgccttatcccccaattgcaactgcaaccctccattctcaatctcattctcaacctcactctcaccatcatcaccatcatgctgttgcctcattcaatcgcatgcttcttatgcgccctcccccacccaccttccattttgacaacattctgagttcccttgtcaagaacaagcattatctcactgtcatttccctttttaaacaattccaatcaaatggggttacacctaacctttgtactctgaacatcctcataaactgtttttgccatctggctcacatcacttttgctttttctgtattcgccaacattctcaagaggggttatcatccggatgcaattaccctcaacacactcatcaaaggcctctgtttttgtggggagattaaaagagcactgtactttcacgataaggtcgtagctcaagggttccagttggaccaagtcagttatgggacattgatcaatggtttgtgcaaagcaggagagacaaaggctgtcgcacggttactgaggaagctggaaggacactcggttaaacctgatgtggtaatgtacactacaataattcattgcttatgcaaaaataaacgcgtaggagatgcctgtgatttgtactctgagatgattgttaagggaatttccccgaatgttttcacctacaatactctgatctatggcttttgcatcatgggtaatttgaaagaagcattttccttgttgaatgaaatgaaattgaaaaacatcaacccggatgtttatacctttaacatattgattgatgcattaggaaaggaaggtaagatgaaagaagcatcttccttgatgaatgaaatgatattgaaaaacatcaacccggatgtttatacctttaacatattgattgatgcattaggcaaggaaggtaagatgaaagaagcattttccttgttgaatgaaatgaaattgaaaaacatcaaccccagtgtttgtacctttaacatattgattgatgcattaggcaaggaaggtaagatgaaagaagctaaaattgtgttagctatgatgatgaaagcatgtattaagcctaatgttgttacttataattctctaatagatggatacttcttggttaatgaagtaaaacacgcaaagtatgtattccattctatggctcaaaggggagtgacacctgatgttcagtgctatactatcatgattaatgggttatgtaagaaaaaaatggtagatgaagctattagtctctttgaagaaatgaaacacaaaaatatgtttcctaatattgtgacttatacttcacttattgatggtctgtgcaaaaatcatcatctggagagggcaattgcattatgcaagaaaatgaaagagcagggaattcagccagatgtatactcatacacaatacttcttgatgcactgtgcaagggtggaagacttgagaatgcaaagcagtttttccagcatcttttggttaaaggctatcatctgaatgttcggacatataatgttatgatcaatgggctttgtaaagcgggcctgtttggtgatgtgatggatttgaagtcaaaaatggaaggcaaaggttgcatgcccgatgctataacttttaaaacaattatttgtgccctatttgaaaaagatgaaaatgataaggcagagaaattcctccgagaaatgattgctagaggcctactggaagtgtaaaactagatgcgatggtttccaattattattgaataaatagttcattcataacaacaaatattcaaccgttcattttttctgatttatataaactttttatacccattcccatttgcttatagatacaatcctgtacatatgactcaacttcactagtctacttgtggtatttttatttgcattttccctttcaattttgatttgcatgtgagctttgggttaatttaccatcagtttgctttcttctcttattttactaggatatttttttatcattctgcatgtgttgattgtgttcaacacatagttcaacaaattttttaaagctttgccagttcccacttcattttttttatcagactctatcattgataggatgaaaattgtgcattgtattgctttggcaatatcttatagaactacaagctgagagtttgtatttggtacttgtttataaatgccattgccaggagcatggcaacgaggatatgatggttaactttgcatatattcaataaccataatcagtttttgtttacaatcaaaatcattgtattgagtgtcactaaatttttcactttgcgaagaatgtttgaattcatttatcatgtggtgcatccaaccaatttgcgctttaagctacctagctttgtgagctgaggaacgggctttgattaggtaaggatttcattgtcagttcctgacaattcactttgcaaggaatgtgctaatttcattgtcaatagacccacagtcttggggcatgagtcttgtgaaattgtagatgatgttgcactgaatcagttggctttgtagcctggaatcagttgcccaagatgccatttctataaagttggctgcaataatccctgtcccctgatagaatcttcattctacttcctctgcataaaccacagttcttgtgccaataagctgttgaggagcatgttggtaagaaatgccatgatgggcatggtgatgttgatgatggtgaagaccagaatgattttgtggacattttgctttcgattcaagagactaacaccacagatttccagattgatagagcattcgtcaagactttggtcatgagtttcaaccagggagattcttgaagagttcattggatatcaaaggacatgatttcgaattgatccgatttggagctagaagaaggggttgtccaggaataggctttgccatggctttgaatgaggtagtccttgcaaacattgtgcaccagttttattgggcagtgcctggtgtagtggtggagggaacagacattggatatgtttgaaactactggattgattgttcacaaaaagttaacctcttgtgacattttcatcaccttatgtgtaacaatattttttttaactaaaagaattgaacttactactagaagtttactacaactgatgctcattgctcaaaacatttataataattcatgcaaattgttcaatcaactgaattag

SEQ ID NO: 712 - DNA, 1023 bp, Glycine max
atggatgtcgccgtctccggaaactctctcgccggaacttccacaccctataaccgtttgcaagaactaaaggccttcgacgaatccaaagctggagttaaaggcctggtcgactccggcatcaccaaactcccaaaaattttcgtccggccgccagaggacctcgccgccgccgacccagtatccggcaaccctgccggtgcccagttcacgatccccataattgacctcgacggccttaccggcgagcgctccggcgtggtggctggagtccggcgggcggcggagacggtggggttcttccaggtggtgaatcacggaattccggtgaaggtgctggaggagacgatggcggcggtgcatgagttccacgagctgccacaagagttgaaggctgagtactatagcagggagcagatgaagaaggtgaagtatgggagcaactttgatttgtatcagtcaaagtatgctaattggagggacactcttttctgtgtgatgggtcctgaccctcttgatcctcaagaactgcctccaatctgtatggatgtagcaatggaatactctaggcaagttaagttgttggggagagttttatttgggttactatcagaagcacttggactcgaccctgaccatcttgaaggcatggattgtgcaaagggccactcaattttgtttcactattatccatcatgtcctgagcctgaactcactatgggcactaccaggcactctgatcctgatttcctcacaattctgcttcaagatcacattggagggctccaagttttgagccataatggatgggttgatgttccccctgttccaggagctctagtagtaaacattggagatctgctacagctaatatccaatgacaaattcaaaagtgtggagcaccgtgtgcttgcaaaccgcatagggcctagagtatcagtggcatgttttttcaccattcatttctacccatcaacaagaatatatgggcccatcaaggaactattgtcagaagaaaacccc

SEQ ID NO: 713 - DNA, 1023 bp, Glycine max; identical to SEQ ID NO: 712

SEQ ID NO: 714 - DNA, 1739 bp, Glycine max
taagtcaatttctctgcttgccaaactttggggctttgatatttggaaatgtctgaagtgagaaacaaagtggatttcatccagttgcttggacctgacatgtcaatcaagattctcacccatttggatgacccttgtgatcttattcgggtttcttctgtttccagttcttggcaccgatttgttattgaacatggcctctgcaagcaactttgcttgaaaatgtttcctgaaatatctggtgttgctcatataattgagcttgacaacattattgaaccactaagcaacactcttggcagttatgtaagttgggagtctcataagagaaatcatagagtctatgcatttttggcttctggtcttactcctatgaggaaaaattgcatctcaaaagccattagtgcatccagcactgataactaccctgaagaaagcattctacatacgttggagcctggggatagaactgaatatagagcatcatactggtcaagcaaaggggaaagcgatccttctgttcctgagactttagtttatgagctagcttcaaaattatgtcttgttacggagatttatgtccatccattccaagcatattttcagcatggcttccctatatattctgctaaggctgtccgattcagaatgggccattcgaaacacccaatggaattagagagtcctgtggacaacatggctgctaatcacgtcttgggcaataatcaattcatatggacatatacatcacctgaatttccaatgcttcaagaaaaccgcttgcaaaaattcaagctacctgaacctgttctgtgcattggaggtgtactgctagttgagctgttgggtagagttcaaaagcaagaaatggatgaattattctatatatgcatctctcatgttcaagttatgggacgactgctttttccggaatttgatgtcaaaattcatcattggtcaggaaagtgtaccttgaaatactgccctcaaacagattgttatatgtcttctccaacatcatcaccgagaagcaactcgagtaatccgtcacgcctgcggaccataacctcaagcataatgcagaggggtgtgagacgttgggagcaatttctcttgggtgcattgcttggtactggtcctgttgtagttgataatgaagatcaatgaaaaaaaaaaatgtaagtaataaagtacttccattctcaaatggaagatattggtcccaatatctgtatagcatggaatatgttgagcacaataataagtagggggaagaggcaaagtttcatctttatttgtttctttctgttacataagtcttgtcttcatggctagttattaaggataggttgtacacaaattttctggcggctcgaattgataacgaaatttgtattgatgataagaaggatgatggagtacttctaccacgtattctacataatcacgtgttccaacctggtggcaactgatacagacaatcctcttgtttgaacctttaaaatatgccattcagattgggtccctatgatgaaatatgtgcatatgcaaaataattgtaagtatcatcatcatgttgttcctgtctttggtcatattggtagggattggttacttagaatttaatcttataatcatttaatgctatgtaaccaattggaggtctataaatctctctcctttgtaactgattggctttcccatacgttataatatattctattttgttgaccaaaaac

SEQ ID NO: 715 - DNA, 333 bp, Glycine max
atgagtgaagatatcagggctaatcccttgttgactgtaatggttgaaaaggggaatcacagtgggatagtgcttcatcttcacgtgagaactgagaagactgttaaagtggatgataggagggggagatcgcttaaaaagcatgcggttgaacaaggcaacaacatgatggttatcaaggtgattgtcagtttaagactgagaatgagaatgaagaaaacgtggaaacacagagagggagggaagaaacctgaagaaggaagacactgtgacgggccaggccggaaatggaaagagtgtggtgtgggctttatggcaaaaggtatgcagtaa

SEQ ID NO: 716 - DNA, 2824 bp, Glycine max
agtgttgaagacagtcattgaattgatatcatcaaggtacaatacaatgaaaatttaccaattgaaatggaaactgcgagcatcagaacaccccagaacgggtgccagttgtggggataaagaaaaaagtatgaatattgttccaatcacctacaagaacaaagaaaacaggagaaggcaatgatacaaacaaacatgaggcatcaatctgtcatgtctcacacaaactatttaccatttcccctctgaaaaagcacatcggattctctcgcatttcgctttctcccaacctcgcaacagaggctttgctctgtaaaagctgacaccaaccaccccccttcacgccattcacgccactctcctctgtgttcccacattttcttctttctcatcccctaattgcaagtgcagcaatcaccaggatgttgttgtcttatttattggcattaccccatacacctgaccttcatactctgagcatcctcatcaattgtttctggcatctaaagctcacatcacttttgctttttctgaattggccaacattctcgagagggtttatcacccagatgcaataaccctcaccacactgcactttttcacgacgagggggtagctcaagggttccagctgaacaaatggattgtgtaaaacagcagtgtgcatataatctttctcttccttttttgtcaacaaggtcagcgcttcaccaagtaagtccgagtccattgatcataagagtgtatatctggacatttaaatggtaatcttatgccgagagaacttttcagcatcttttgattaaatgttaccatttgaatgtccagatacgtactcggatgcggacttacttggtaacttttgaaataattatttgtgttctctttggaaaatatgaaaatgatagagactccttcatgaaatgattgctagaggcttattgcaagggtaaagtaggtgagatgctttccaattattaatgaataaaactagttcattcataatcgtaactacaaatagtcaattgttcattttcctgatttatataaactttccaaacctactttcattttcttatgcatacaaacatgtgaagatgactcaacttcactattatacttaatggtatttctgtttcctttccatttttgattaatttgctttgcatgtgggcttttggtgaaaatctatagtcagtatagttttttctcggattttactaacacttagttcgacaacaatttttacagctttgtcagtgtccacttcaatttttttgtcagactctaccattgataggatttaaactgtacactgtatttgctttaatagtatcttgttgaactaccttcctcacatggtactttattttgtccatgctaggcgtaacagtctgggtttattaatttatttctgtttatttgaggggattgtgagattctaatgtgcagctagaggatgcataggattcacagcattggtggtgtggtttcaaagaaattaccataaacagggattagccctgacatctttacctttagcatcctcatgaaggtttgctgccaccttacttagatcaaacggtgtttgttctatgctgggtagtatttttaagaggggttatcatcctatccattaggatcaccacacttgtgacgaatctcttttttcgtgggaatgttgaagaagaattgtaagttcgtgatagtgggttagctcaaggatctcacatgatccaggtggaattgatcaggtggaatccttggatcatgtgatatccttgagctaatacactatcatgaaggcttctttaacatttccaggaagaaagaagcccttcatgagtgtggtgatggtaatggtgataaccccagaaaaaacagcattgatctgagaagggtgaccgtaagcatttacgaggatgagtgaagatatcagggctaatcccttgttgactgtaatggttgaaaaggggaatcacagtgggatagtgcttcatcttcacgtgagaactgagaagactgttaaagtggatgataggagggggagatcgcttaaaaagcatgcggttgaacaaggcaacaacatgatggttatcaaggtgattgtcagtttaagactgagaatgagaatgaagaaaacgtggaaacacagagagggagggaagaaacctgaagaaggaagacactgtgacgggccaggccggaaatggaaagagtgtggtgtgggctttatggcaaaaggtatgcagtaaacaaaaggagggtgtggtggggtttatcaacttgaaatgatgtgggtgatggaactatggaaagagcttgacagggcataatatcagttggagagggttcagactttactggtgtcccaagaaaattctggcagtaaatgacacttcacacatgagcgcttcagacttggcatccatgtgcttcagacttgcaattgttgagattgaaaaaatgctatcagccaagaagaagtcactatattgtaccagtgaacctggaaggtaaccaatcaggttttgctgtctgaggctggatcctccattatagtatcccaaactgttgaagttccacgcacattgaagtttgatatatagtttttaaatacatcttgtatttgcttttctggtaagagacatgggtaaaaagagttaaagtttaatttagtcatcaattcaattttaataaaaatagagttgtatgtaattgtaaagtaattttgtatgatttgattcgtttatggatagagtaatgtgtctcgggaaattaattcattagagctgttacgtgaaagtttatggtgatgaacaggg

SEQ ID NO: 717 - DNA, 870 bp, Glycine max
atggcttcccttgcagcatccactgctgctgcttcccttggcatgtcagaaatgcttggaaaccccatcaacctcagtggtgccacaaggccagctccatctgcctctagccctgcctccttcaagactgtggctcttttctccaaaaagaaggctgcacctccaaaaaaagctgcagctgctgctcctgccaatgatgagcttgccaagtggtatggtcctgacagaaggatcttcttgcctgagggtctcttggaccgatctgagatcccagagtacttgaccggagaagtccccggagactatggttatgacccatttggtcttagcaagaagccagaagatttttccaaatatcaggcatttgaattgattcacgccagatgggcaatgcttggtgctgctggattcatcattcccgaggccttcaacaaatatggagcaaactgcggtcctgaggctgtttggttcaagactggagctctgcttcttgatgggggtaccttgaactacttcgggaaacccatccccatcaatcttattgtggctgtcattgctgagattgttcttgtgggaggtgcagagtactacagaattattaatggcctgaatttcgaagacaaacttcatccaggtggtccatttgacccattggggcttgcaaatgatccagaccaagctgcactgctaaaggtgaaggaaattaaaaatggaagacttgctatgtttgccatgcttggtttctacttccaagcttatgtcactggagaaggtcctgttgagaaccttgcaaaacatctcagtgacccttttggcaacaacttgctcactgtcatttctggatctgctgagagagctccaactctctaa

SEQ ID NO: 718 - DNA, 1844 bp, Glycine max
aagaaccctactgtggagaagttatgatttctgaatcagatgacgtttgaagtctgaaagcatcaactgagattccaccaacgaacggcactcgacggttttttcgagttggttatataaatacgttcacaccgtcgcgtccatttcgttttccaatctctcactctcttctccaatcccatttcaggcaaaatttgcctttgaaggaatcaagtaagtcttgtatgtggattttgtggtattgattttcaatatccgctttatggtttgagcttctattaagaaactgagatacgagctgatcacataggagtatccagtactctctcagatttcatgcctgccatgaaaaagaatcctgagctaacttgtattggttctgtattcaacatgttggggaaggagcttggagaacctgtagactttgaacttccagattcatttaataaatccaagccaatgcagtacacctatataaaacgcaatatatatctcactaagaaggtcaagagatcccggtttgatgatgatggcatattctgttcctgtactccttcccctggatctactagtgtatgtggtagagattgccactgtggaatgcttctgtctagctgttcatcaggctgtaaatgtgggagctcctgtctcaacaaaccatttcagaaccgtcctgtgaaaaaaatgaaattggtcaagaccgagaaatgtggttctggaattgtggcggatgaagatatcaagcttggggagtttgtcattgaatatgttggagaagtcattgatgacaaaacatgcgaggaaaggctttggaacatgaaacatagtggggaaacaaacttctacttatgtgaaatcaatcgagatatggtgatagatgcaacatacaagggaaacaaatcaagatacatcaatcatagttgctgccccaatactgagatgcagaaatggataattgatggtgaaacaagaattggcatatttgcaactcgtgacatacaaaagggcgagcatctgacttatgattaccagtttgttcaatttggtgcagatcaagattgccactgtggtgctgctgagtgtaggcgtaagttgggtgtccgacctaccaagtctaaactttcttcagatgctgcattaaaattagttgcatatcaggtttatcagaatggaggtttgcaaattggaagttctcgtgttgttgaccaaccaaagtgcttgcacaattgcattggtgaagttattaggataaaacatcttgaaaatgagaggtttggaattattaaacgatttgataagtattcccgaaaacattcgatcatgtttgaggatggttgtgttgaaatttatgacatgtcaaaagaggactttgaacttgtgagatagtgttgcaactgttgggtgcaggtgaaaggaattgaaaagctgaaaattggactcattattctttcattgcatgtgcataattcttgtagttgctgaggctcttatcaacagaatatgaagcggaatagctcaacacaactcttactgattgaagataataaattcctttttctactaacaaactgtattatcgtgtaaacaacattgttgttcaaggttctggaaataaaccttgtattttttaaaatcctgaaagtactgtaaaatgagaatcatcttgtaccattagctaggatgtgtagttgttgtttcaagtgtattcttttactttcttcctatttttctagtataaggttattgataaatgtgggagtttcgattaggaaaaacttgttttaatatgcaattaccctttgatcaatgctaaagacatgtaccctatgaagtgggtcacatta

SEQ ID NO: 719 - DNA, 1112 bp, Glycine max
ttcaaatgttaaatagcattttgagatctaattattatttttttcaaaacaaataccctcgtgctgcataacccatttttattttctatatcataatatcaagaagacaagaactaccaaaaatatttgatgaagcactatataaggatgcattctgatattgtgacacataacacaaacacaaattacatagcctcagtaatctgagagagaaacaaaaacaatgaaggtttccattgccaagttccactcccttcccctatgttttttccttctcttggccttcaacacaaaacccctcctagcagcagaaccagagccagtggttgataagcaagggaaccctttggagccaggagtagggtactacgtgtggccactttgggctgatgaaggaggcctcacactaggccaaacaaggaacaagacatgccctctttatgttatccgtgacccttcattcattggcaccccagtttcattcttagcaccaggccttgaccatgttccaacactcactgatctaaccattgatttccctgtggtgacagtgtgtaaccagccaacagtgtggaggctcaacaaggtagggtcagggttctggtttgtgagcaccagtggtgaccctaatgatatcactagcaagttcaagattgagaggcttgaaggggatcatgcttatgagatctacagcttcaagttctgccccagtgtgcctggtgcgctgtgtgctcctgtggggacttttgaagatgctgatggaaccaaagtcatggctgtgggggatgatattgagccttactatgtgaggtttcaaaaagtctccatctttggtcaagacaagaaacaaccttttagcattttgtaggttggtttgtgcctgtaataggtagatgcgggtcatgactcggaataatgagctactagaatgcaatgcaactgtttccttggtgtgcctgtgtgaaagaatcgaataacaagtttattgatcttttaattttttttaaatttacttttattttttaatttttaaaatctatttaatttgattttataatctaaattgagttaatatcattcagaaatcatattttatgattacatgattttaa

SEQ ID NO: 720 - DNA, 5941 bp, Glycine max
aattaaaaataactttatagtacaacatatatgattaattataaataaatttaattacataaaataaagttttgtcgttggcatggtaaaattccaatcaatgtcatcggagcctcaccggcggcgtctgctgacggcttgacgtgtcgccctctcagtccgaagcgttcttctgcgtggtcagtggtgtgcgcttaatgctctgtttggtgtttttaaatttgacttgagcagagatatggactcagttatgaattgggcagtggaagagatatgtggttgtggttgtattgaagaaggactcactcttgcagccctatgggccaagcttgaagcctcaccctctctttcatcctccaatctccatctctctcctactgtcaaaagagccatttggacaaacctcctccgcgttccgactctccgatttgaaccacactcttgtttggagctggaggatgctcagaacctcaatttaaggatctttcctcagcatacccttgccaacaactttttaggcctttatgatttccagtctctccaagatgaccaaatgcgcgtccttcgccttcttgccggtgctagagccaatggcatcactcaaactcagctcgctaagcgtttgcacattgctgcaaacaaattccattatgtgttgaggagtcttgagtgtcaaggcttaattgtcaagcactctgctatcgagaagaagaaacaaaatggtgaatccaaaaattatccatgtgtaactacccatttagtatgcttacatcgctatgcaaaacaagttgcctctcatcatcaaaggtttgaatttgaagttaccaaattcaacacgcccggcgatgactacgaggatgcagatggaaccacacttcaaacagatgttcatcttaaggattatacacctcaaatgaaagctatttgtgacaaacttgcaaaagccaatggcaaggttcttcttgtgtctggtattaagaaggatcttggtttctgtggatcgcgtcaaggacaaagggcttggagaaaaatttctcaaaggttgaaagcagatgctattgtggagcagtttgacgctaaggtgaatgacaagattgaggcttgcctgcgacttcttgacccaataactactggatctggaaatgaagataaaaagttaaactccgggaaaatatgtcaagttattgatcaggttgtggagcttcccattgagcatcaaatttacgatattattgatgctgcaggatcctatggcattactttgaaggagatatgtgaaaggcttgggattgaactgaaaaagaaccacattcaacttataaatttgtgctatagatttggaatgaaagtgcaagaagaacaatgcctaaaaactaagacaattcgagtttggacttctaaaaatttcaaccctgaaccagaagttgaacatattttcaaggttgatgaaaataaattttttaactgtgtgcctgacagttcaaaaataatatctgaatttgaggcttcaagttcaactatcaatggagaacttgcagaccctgcaaatttggaagatagagaagttggtgcagaactctcttgtgtatctccaagaaatacagagttaaactttgtagaaacaccaacagacttgcaagatttggcctttggccgaagaggtacggtttctgactgcaaattggtcagttcaacagtggaggcaggcaatacaccatcaggagcattcccatctgatgtgttgaaaccattctctactgtgaatagcattagaagggcaaataggatactaaaaaggctaaaggatgaaaggttccttttgaaacctgagataaataggtggcttaatagccttgagaatgataactctacaaaagtggaccacaagactattgaccgaatattaactaaacttcaggaacaagggcaggtcaaacgcataatagtaagttcgcctgttatttctgaatattcccggacaaaaaaatgtgtggtggttgtgcattcatccgtgagtcaatctcctgagttatttgatgaaattcaagatagagtgcgatcatttaatacttgtattcgcagcaaaagtacttcatatcagaaaaatgatgaattcatacctgtaatggaggatattcagaaaaatcaaagtgttatagtttcagctgggcgggctaataaagcagaagccaagcatgctaatggatttgtattagcaaaaatgattcgtgcaaagctactccacagttttctttgggattgtctgcatagggaagcaagctatattgatgatttatcatctaaaaaatgtgtcaatgagcaaactaataatcctcatagtagcatcaaactattttgtctagaagctgctattaaagaaatgtcagttgaactattattacaagttgttggctccactaaaaaatatgaagaaatgattgaaaaatgcaagatgggtttacgtctctctgatcttcctctggaggagtacaagtgtttaatggatgctcatgcaacaggaaggctgtcattagttattgatattttacgacgattaaagttgattcggatgataactgatttgcaatctagagatggagtcaaaacccctcatacttttactcacgtgatggagcttaggccttatattgaggaacccttttcaaatgatgcaccatctttaaattttatctctcttgatctccgaccaagaatcaggcatgattttattctgtctaatagagatgcagttgataaatattggcacatattagagtattgctatgctactgctgatcgaaaagctgcttcttatgcatttcctggatctaaggtcaatgagctttttcgcttccgttcatggacatccacctgtctaatgacagctgaacaacgtgctgagcttttaaagcatgtaacaaaggataatcttagtgaaaaaatttcatataggaattctgagaagattgcaaaagatctgaatcttagcttggagcaggtacttagcatgtattctagtaagcgccgccgccatttccttaatcagttggatgatgaagagaaagaggataattcacctgaatgtaagggtaattcatctcgttgtaggaaaaaaaattccagtgagcccaggcttgcaaaacatgcaagaattgatgcagtaactgatgttgaggacatgcacatagaagaatcacataattttggtgtgcattcaagagagcgtgccacacatatgcaaaaatttgaggatgattatggacttgaggattctcaagactgtatcccccttattaaccagtgtgtcttgacccaaatgaagctaacgtgccaaaggagatttgtttggtcagacaaaattgacaggcaattggtgatccaatatgttaaacaccgtgctgttcttggggccagatatcatcgtataaattggaagtcaatttctgatctcccagcttctccaagtgcttgtatgaggagaatgaatttgttgaatagtaatttgaggtttaggacagctgtgaatggactctgtaacatggtcagtgaacgatatgcaaagcaactcgaaaagtcccaaaagttgtcattaaacaaagatgattgcaaacagtttgtgcgatcccagtcctgtgaaggtggtatcctcaatcattttagtcctgatgttgaaattcaaatgacgagtctaaatagagatgcttgggatgactttgagaacaaaagtatcaaggcagcccttgacgagattctccgttgcaagatgatggctaagctggatgcctcctcctcccaaaaagttcaatcgcaatatgaagggtgggcagatgcaaatgaatctcaagaaaacgaagaaattacatcagctattccttgtgaaattattcagagtcatcatggtaatagggccaatgtttatggacaagtaaatgaatcattggctgtttcaaatgctgtagagctagttaaaattgtttttttaagcacctcaacacgtctccaggcaccaaatttactagccgacattcttcggcgatactcagagcatgatctaattgctgcatttaactatcttagagagaaaaaaattatggttgggggcactggcagtgaatgtgttgaactgtcacaacagttcttgcacagtgtttcgaagtcaccatttccatttaatactggaaagcaagctgttaaattttctgcgtggctggaggaaagagacaaggacctcacagaagtgggtgttaatcttgctgaagatctacaatgtggggacatttttcatttatttgctctagtctcatcaggtgaactttctattatgccatccctaccacataatggtgttggagaggcagacttgagaagtgcaaagcgtaaatttgatgccactgagttttcatatagtaataaaactaaaagaccaaaatccttgtttggaatagatggtgaaattatttctcgtcgggaaaaaggttttcccggtatcttcatttctgcacaccgtacagcaatttcaagagctgatattttaaatttgttcaaggataatgataacaatggccaaccttttgagggccaaagcagtaattattcacttcctgaccatatgttggaaatcattaaatcgtttgaccctataactctggaagaaaatcataccaaatcaccctgggaaagtatggcaggctatgcacagcatttgttgtcagagtctttcaatcaagaacatgcacgtgccatttgtgctgagctcttcagagtcgtttatgctgccattcaaaagtctggtgaccaaggattaagcatgggagaaatttctcaggttataaacttgccaggagcagaggtagatggattgattgttgatgctcttcaagcatttgggcaagccttaaaggtcaatgcttatgatactgtccgtgttgttgatgccttacaccttcacaagtacttttttacacctgtgtctgattttcatcaacatgttgtacaaccttcctcaacaaaaatcattgagaaaagtgatcatatatgtgagctttacaaatcagaagaaaggaacactacttctattgatactctaagggaaagaaacactggtattgataatgtgcacaaagtgacaattcttaatcttccacatggggatgtagatcctgaaaatcaagcttgtgataggattgaaggctctaagcaagacagacttggcttatccagtgtcaatcatgaaaaagaaacacttaaattttctgctggtgaattttgtgtgccaatattgccatggatcaatggagatgggaccatcaacaccattgtttacaggggactcagacatcgtgttgttggaatagtgatgcaaaacccagggatattggaggattctattctacatcacatgcacgtgttgaatccccagagctgtagaactctcttagaactgatggttctggataaacacctaattgtgaagaagatgcatcaaataatatttgatgggggaccctccttacttcaggatcttattggaagcaaatctagtcaaccaaagttgatttgcagagaacatttcttcgccaatcccatgagtacttccttgttgtagggaatctgtggcctcaacatgtaaaatcaatagatgtgtgtgtatagagtgagagtaaattgtgtctgtgtatataaaaacaaatttacaggtaattttggatactggccttgggtttatatttggaacaattgcaactcaggcaatcctaggaagtttcttatcaacctgccccactcaagttatggcttacaaaattatgtcaaggtgaaagatcattaatgttttattgaatacattaagttgcataaatatgaggatgaaaaatcaattctataatggggaataagggtttaattaccgggtggagattttctagggaagaagagaatatta

SEQ ID NO: 721 - DNA, 645 bp, Glycine max
cattctcatgtcccaaagtttggtaattgggactgtgacaacatcccatacacagtatattttgataatgcacgcaacaaaaagccttttataaatccgaacgacccagaacaaaatccggaggtcttcaatctttacatgagaggagttgaaaaaagtgacgaagcagtgaaggcttcttctactcgtatgcgcatgcgctcctatagtactagttctttagaacaaacaagccatgaacatgaccatgaggaggggagaagcaatactaaaagccattcccatcacacgacagaatctgtcagtgaaagaagcaattccgattactctgtcattcagagagtgaagtcagatttcattggtagcttctcttcatcaaatcacaatattaaaggcagaggtggaagccattcccttattaatgaccacgtgaaccatgaagcagcactagtaccagaatttggtgcttgggatgtcacagaccctaaatcaggagaaggatatactgctatattcagcgaaataagaaaagaaaaggaaattgcgtctggccgcatgcctaaatcaatgtggcagaccttcctccattttatccaaggtaatataaaaattagtttagttggttacaagttaattaaatattaa

SEQ ID NO: 722 - DNA, 2355 bp, Glycine max
aatgtccttagtatcattaattgtaaggcagaatttttacacacacacaagttgattttgggctgaacctttttcactggcacttattgaagtccatcagtctgacagagtttggggagtttgattcaaatgttcaatgattaccattatgctgggttgagcacatgtcactagataatgaaacaggactagaccatccaggcattagagttaggcctgtgtctggacttgtagcagctgattattttgcacctggttattttgtctgggcagttctaattgctaatttagctcgcattgggtatgaggagaaaaacatgtatatggctgcttatgattggagaatttcatttcagaatacagaggtcagggatcaaactttgagcaggatgaaaagtaatatagaactcatggtggctactaatggtggtaataaggtggttgttattccacattcaatgggtgttttgtactttttgcattttatgaaatgggttgaggcaccagcaccaatgggtggagggggtgggtcagattggtgtgccaaacatattaaagcagtgatgaacattgggggaccttttcttggtgttccaaaatcagtcgcaggacttttctctatagaagccagggatattgctgttgccaggactttcgcaccaggtttttgggataaggatgtttttggtcttaaaactttacagcatctaatgcggatgacccgaacgtgggattcaaccatgtcaatgatacccaaaggtggggatactatatggggtggccttgattggtcagctgatgtatcctataactgcagtgtaaagaagaacaagaacaatgatacttacggtgcatttcaaaatggcaaagagaatcttgggtttatgaaaaatataaattatgggagactcatatcgtttgggaaagatatagctgatttgcactcctccaagcttgagaggttggattttaggggtgctcttaagggtaggaaccttgcaaacacatctaactgtgatgtgtggacagagtaccatgacatgggtgttgatggaatcaaagctgttacagattacaaagcttacacagctgattcaattttggatctacttcattttgttgcccccaagatgatgaagcgcggggatgctcatttttcttatgggattgctgataatttggatgatcagaaatacaaacattacaaatattggtctaaccccttggaaacaagattaccaaatgctccagatatggagatttactctatgtatggggttgggatccctacagaaagagcctatgtctacaagttaactcctcaatctgaatgccacattccatttcagattgacacctcagcagatggtggaaatgagtacacatgtctaagggatggagtttacagttctgatggtgatgaaactgttcctgttttaagtgctggtttcatgtgcgcaaaaggttggcggggaagaacccgctttaatccttcaggaatccagacattcataagggagtatgatcatgcccctccagctaatcttctagaaggtaggggaactcagagtggcgctcatgttgatatattgggtaactttgccttacttgaagatattatacgagtagcagctggagcctctggcaaggacttgggtggagatagagtgcactccgatattttcaaatggtctgaaaagatcaatttgaagctctagattcacatggtaaccgattactatcttcacatcattactttagtacttgatagaatcctatctgcttcaactgttgactgttgtgctttaagatagagctgaaggtatgagatctggagctgatagaccagtcgcagtgacagcttgcttcttactcggattttatctatagaatttcattgtttcgggaaagtgttgaatctgtttacaacccccatccccaagaaaaaaaattataccaagctcttagtttaggtgcatgattcatgcttgacgagaattttgttgattgcattcattgatttgattattgtcaagtgtattggtgttagtctgctcccgttttcactctactaattttttatgcgctgcacggactacattctcttgtcggtcagaagttttgaaaagattgaatccaagcctcaagtataggaataacagtgtcgtagtgtagtagttgttattattattattattatatcctaacactggagttagttaggaatattgtttgttatatcacgttgtaccttccaatttccattatgatgggtttataaatgcatggttttaatttgaaaccaagatttactgtaaattggtgtaaacaatagattattattgatgaagttgg

SEQ ID NO: 723 - DNA, 2504 bp, Glycine max
tttaacccacttgagctcttttttcttttcttaatctgcaggtgaactctttttcttttctaagctatagaaagtagaaaccgcatataattaattaattataatttaggtgtcactctcttccttgttaaagaattaattaacctagctagagacatgtctataagagaggactaacggtgaaggtttaagcctctttggcctattctttatcgtgagagttttgcctttatttctcagccatgtttccttcttttccagcttaaaccgctaccctacaaaacctttcacaattctctttcttcctagctatctctttctttctgtctacattgacctagctagctacaaaccctgcattaaccatgatcactggtaaggatatttatgatgttttcgcggctattgtgcccctctacgttgctatgatattagcatacggctcagttcggtggtggaaaattttcacacctgatcaatgttctggcataaaccgcttcgttgctgtgttcgcagttccacttctttctttccacttcatctcctccaatgacccttatgctatgaactaccacttcatagcagctgattgtcttcaaaaagttgtcattttgggtgctctctttctatggaacaccttcacaaaacatggtagcctagactggacaatcaccctcttctcactttcaacccttccaaacacacttgtcatggggatccctctattgaaggccatgtatggagacttctcagggagcctcatggtccaaattgtggtgttgcaaagtgtgatatggtataccctcatgctgttcatgtttgaatatagaggtgcaaaactcctcatcacagaacagttccctgagactgcaggctccataacttccttcagggttgactcagatgttgtctcactcaatggtagagagccacttcaaacagatgctgagataggagaagatggaaaacttcatgtggttgttaaaagatcagcagcttcttccatgatatcttcattcaacaagtctcatttaacttccatgacaccaagagcatctaacctcactggggttgagatctattctgttcagtcatcaagagaaccaaccccaagaggttcgagtttcaaccaaacggatttctatgccatgttcgcaagcaaggcaccgagtccaaaacatggctacacaaacagtttccagagtaataatggtggtattggtgacgtttactcgttgcagtcttcaaaaggggcaacgccaaggacttctaattttgaagaggagatgttgaagatgcacaagaagagaggagggaggagcatgagtggcgagttgtttaatgggggtttggtttcttctaattacccgccaccgaatccaatgttttcagggtctacgagtgctgctggtggccccaagaagaaagatagcagtggtggcggtggtgctgtagcacctaacaaggagttacacatgtttgtttggagttcaagtgcatcacctgtttctgaggggaatttgaggcatgcagttaatagagctgcctctactgactttggaactgtcgatccttctaaggctgttccacacgaaactgttgcctcaaaagctgttcacgaattgattgagaacatgagccctggtcgtagagggagtggagagagggagcctgaaatggatgaaggagccaaaattcccgcaagtggatctccatacacttgccagaagaaggtggacatggaagatggcaatgcaaacaaaaaccaacagatgccacctgcaagtgtcatgacaagacttattctcatcatggtttggaggaaactcataagaaatcctaatacttactccagtcttttgggactcacatggtctctcatatcatttaggtggcacattgaaatgccaactattgtaaaaggttccatctcaatactgtctgatgctggtctaggaatggccatgttcagtctaggtctattcatggcattacaaccgaagatcattgcctgtggaaaatctgtggcagcattttcaatggctgttaggttcttgacaggtccagctgtgattgctgcaacctcaataggcatcggactccgtggagttcttttgcatgttgcaattgtccaggctgctcttccccaaggtatcgttccctttgtgtttgccaaagaatacaatctccatgcagatatacttagcactgcggttatatttgggatgctaattgcattgcccataaccatactctactacgtgctgcttggagtttaatttgtcttgggagacaaaagcaatagaaaaagaagtatatgttgctataactgtacgtactatgtaaacccaatgtcacgctcaagcggggtggatgaagggaaatgtagaagatattggattttagatgttagagggaaagagaaattatatatagtatacggtagaatgctatatatattaattatttatgattcatatgaaaattttggtttgattcgttcc

SEQ ID NO: 724 - DNA, 3650 bp, Glycine max
ttcaccttcgcccccacattttgaaatccaattcatgctcttattatttgtatttttcaaactttgtttcatttacaactatgcaattcatccgaattctcaagtctcacgtcgcatttgaaggccttgacactgtggttgaacattaattgaagacaagaaaatggtacctgaaagagggcttcctttcagggtaattgtttcctatattcaagctaggttgtggaagacaaatagtagaatagcagtatgtccatttctatgagagatctggatccagcttttaagggagctggacaaaaggccggattggaaatatggcgtattgagaattttaatccagttcccatccctcagtcatcttatggaaagtttttcactggggactcctatgtgatcttgaagacaactgcttcaaaaagtggtgctcttcgtcatgatatccattattggcttggtaaagacaccagtcaggatgaagctggtgctgcagccatcaagacagtcgagttggatgcatctttaggaggacgggctgttcagtatcgtgaagtacaaggtcatgaaactgaaaagttcctctcttatttcaaaccatgtatcatacctcaagaaggtggagctgcctcaggttttaaacatgttgaggctgaagaacataagacacggttgtttgtgtgcaaagggaaacatgtagtgcatgtcaaagagattactttcgctcgatcttcactgaaccatgatgatatttttattctggataccaagtccaaaatcttccaatttaatggttccaattcaagtattcaagaaagggctaaagcattggaagttgtacagtatgtcaaggatacctaccatgatgggaaatgtgagatagcttctattgaggatggaaagttgatggctgattctgaaagtggagaattctggggttgctttgggggctttgctcctcttccacggagaacagtcagtgatgatgacaagcctgctgattctcatcctccaaagctactttgtgttgacaaggggaaggcagaacctattgaaaccgattctttgacaaaggaatttctggacacaaacaaatgttatattctagattgtgggttggaagtttttgcatggatgggaagaaacacatctcttgatgaaagaaaaagtgcaagtgtagcagcagatgagttaatcaggggcactggtcgaccaaagtcccatataattcgtgtaattgaaggatttgaaacagtaatgttcaagtccaagtttgattcttggcctcaggcaagtgatgcaccaatgtctgaagaaggtcgtggcaaggtagcagcacttctaaaacgtcaaggattggatgtcaagggtctcgtgaaatctgagcccaaacaagaagaacctcaaccccacatagattgcacaggacatttgcaggtttggcgtgtgaatggtcaggaaaagattcttcttccagccactgatcagtcaaaattttataatggagattgctacatctttcaatattcatatcctggagaagataaggaagagcatcttataggaacatggattggaaagactagtgttgaggaagagagagcttcagctctttcactagcaagcaagatggttgagtcaatgaagtttcttccttcccaagctcgtatctatgaaggcagtgaaccaattcaatttcatgccatcctgcaaagctgtattgtttttaagggtggacttagtgatggatacaagaattacattgcggagaaggaaattccagatgagacatacaatgaggatggtgttgcattattccgcatccagggcactggaccagacaatatgcaagctatacaagttgaaccagttgcttcctccttgaattccacttattgctacatacttcatagcggacccactgtttttatttggtctggaggtttagcaacttcagatgaccaggagcttgttgagagaatgctggatttgattaagccggatgtacaatgcaaaccactaaaggaaggcgtagaatcggaacagttttgggatttgttggggggaaaaacagaatatcccagtcaaaagatcacgagggatgctgaaaatgatcctcacttattttcttgcaacttctcagaaggaaatttaaaggtgaaagagattcacaacttttcccaggatgatttgatgacagaagatatttacatcttggattgtcactcggaagtctttgtctgggttggccagcaggttgactcaaagaatagaatgcaggctctaacaattggcgagaaatttcttgagcatgattttctcctagaagcattatctcgtgaagctccaatatatattgtcaaagaaggtagtgagccacctttcttcactcgcttctttaaatgggagtctgcaaaatctgcaatgctaggaaactcatttcaaaggaagcttgcaatcgtgaaaaatgggggtatgccacttatcgttaaacataaacgaagagcatcagcaacttttgggggaaggtctagtggtgcaccagataaatcccagcgttcccgcagcatgtctgtcagtcctgatcgtgttcgtgtgaggggcagatctccagcctttaatgcactagcagctaattttgagagctcaaatgctaggaacctttcaactccacctccaatgattagaaaactgtacccaaaatctgtggcaaaggatacagcacaactggtacctaaatcttcagccatagctcatcttacttctagttttgaaccattctcagcgctagaaaatttgattcctcagtcacaaaaagcgaattcagttacccccaaatcaaaccctgagacaagtgacaaggagggttctatgagcagtaggatagaatctcttaccattcaggaggatgtgaaagagggagaagctgaagatgatgaaggtctcccagtttacccatatgaacgtgtaaacacagcttctacagatcctgtagaagatattgacgtgactaaacgagaggcttatctgtcatctgcagagttccaagagaaatttgggacggcaaagaatgaattttataagttgccaaaatggaaacaaaacaaactcaaaatggcagttcagttgttctgagttaaattacacttcaccttctgtctcctccgtgcattttaagttgcagttagagggaactttggttatcgtcaaagtttacatattttttccttgacattgttatctgtgttttatatctcagggagcttgctatctgttttgcagtaagaaactgaacatatggaagtgaaaggggacagcatgagcgttttttcttctttttcttttaatatagctgcttcgacttccaagaagctcctcttgaggaagaaagtaaataaagattcttccttacagtagtttgatatttaggttctttctttgttgagagctgcttggtgttgattttataggccaagggttgatggagtgcctgtcttaatttgtttttcttgttgatcatttttgcattcaaaattgttttggggaagcaattacttagattgttttgataatcaaagtatgaagtttgtacagatgtgtaaaagccactcaacaagttatttattttggaaataaaagtgtgatttcccccc

SEQ ID NO: 725 - DNA, 1701 bp, Glycine max
aaaatgcattcattcatccgtgtgtgacaagaactagcagagtaaataattccatttctctgcacacactcacaacagtgactgaacctgttggccaattttcatttgaaaatggtacttccctcccctgccaaaatactagttggcctctccttagacccagatgacaacaaggagcttctctcatgggcaataagagttttagccaatccaaatgacaccattgtggctgtgcatgttcttgttgttgcggacaagaagaagcgtgtctcggtcagaagaaggcaatcacaacttaggcaggcaaaagcttatgttatatctgtgcttggagaatttgtacaatgctgttggtctaagcaggttaatttagaggccagggtagcactcaattcctcagttggtgaaggtttagtggaggaagccaagtccatcagtgctgactatcttcttatccgtggctcgagaaaccgaacaaataaaattggaacttctaaaggaattaccaagtattgctttgagcatgcacatgatgggtgtacaatggtctcagttgggagacttacaaaggcaaatcaaagtgccaattcaaactcaacacgttttcaagataaaagacaaccaagttcaagatggtttaagaaggataaccaatatggcaagggtacctcccctgttctaaaggattatatatcaggaagcaaggctcagaaccgttcaccaagaacagtactaaatggtctagagggacaatcgaacagcactgaagatgataccttcagcactagggtctcaagcaccacgtataccccatcgtcatcggattctaagaggcgatccaagataagaaaaccacagttctcgttcaggttcatagcctcattccttgcttcaccatttagaagcaaaaactttagcatatccaaaaatgaaaagcgtcagcctttgttgaagtgcttcagctatgaacagatatccaatgctaccaaagacttccaccgagataatttggttggacgaggtgggtactcggaagtatacaaaggtgatctttcagatggacgaagcattgctgtgaagaggttggccaaggacaacaaggatcctaacaaggaaaaagagtttcttatggagttgggtgttattggacatgtctgccatcccaatactgcaactttagtgggctgctgcattgaaaatgggctttatctgattctcaattactctcaaaatggaaatttggctactacactccatggtaaagcaggagattcactagactggccaatcagatacaaaattgccattggtgttgcaaggggtcttcattatcttcacaaatgttgtaaacaccgaataattcaccgtgacattaaagcctctaatgttcttctgggtcctgattatgaaccacagattaccgattttgggcttgcaaagtggcttcctaacaagtggacccaccatgctgtgatccccgtagagggcacatttggatacttagcgccagagtactttatgcatggaatcgtggatgagaaaacagatgtttttgcatttggaatcctacttttggagattgtaactggacggagacctgttgattcatcgaagcaaaaccttctcttatgggtaatcatacctttcattcccttatagagtatcacaattcacaaatgttgctgattaacaaattaggaa

SEQ ID NO: 726 - DNA, 1206 bp, Glycine max
atggcaacaccacttgtttatagacttgtttcattgcctttcatatttcatttcaccttaaccactgccaccatcataacctcatctattaacccagtgtttctcatacactatgagtcaacactatcactctacaattcaaaagacaccacttgggatcattactcgcataaaatgcttaagcaaacttctagtaatgaatatatctccaatcttgttcctagccctagaaatgttgtgttcttaattaatttctccataggtgaaccacctgttccatcacttgctgtcatggacactggtagcagctttacatgggttatgtgtcatccttgttcatcttgttcgcagcaatctgttccaatatttgacctctcaaaatcttccacatatgctttgacattcagtgaatgtaacaaatgtgatgtggtgaattgtgagtgtccatgcagtgtggagtatgttgggagtggttcatcaaaagggatctatgcaagggagcaattaacttcagaaaccatagatgaaaacgcattcaaagttcctagtttgatatttggatgtggtcgtgagtttagtacatcatcaaatggttacccctaccaaggaatcaatggggtgtttggacttggtagcggaaggttctcgttgctacctagctttggtaacttaagaaatattaatcataagtttaacatattggtcttgggggacaaagccaatatgcaaggtgacttaactaatttgaatgtgatcaatggtttgtattatgttaatctagaagctataagcataggagggagaaagcttgatatcaatccaaccgtgtttgaaagatcaataacagataataacagtggacttatagaatatggatttgaagtgcttagctttgaagttgagaatcttcttgaaggggttttggttttggcccaacaagataagcacaatccttatactttatgctatagtggtgtggtaagccgggacctaagtggctttccgttggagacatttcattttgctgaaggaaccacagagaatgaattttgcatggctgtgcttccaggggactattttagagatgactatgaaagcttttctcctattggaatgttggctcaacagaattataatgtgggttatgacttgaatgggatgcgtgtgtactttcagaggtttgactgtgaacttcttgatgggtga

SEQ ID NO: 727 - DNA, 1938 bp, Glycine max
atggcgacaaaggaaggcaaagccataggcatcgatctcggcacgacctacagctgcgtgggcgtgtggcaaaacgaccgcgtcgagatcatccccaacgaccaaggcaaccgaaccactccctcttatgtagccttcaccgacaccgagaggctcatcggagacgcggcgaagaaccaagtcgccatgaacccgcagaacaccgtcttcgacgccaagcgtttaatcggtcgcagattctcagactcttcagttcaaaacgacatgaagctgtggccgtttaaggtcgtggctggccctggcgacaagcccatgatcgtggtcaattacaaaggcgaggagaagaaattctccgccgaagagatatcttccatggtgttggtcaagatgagggaagtggcagaggcgtttctcggacacgccgtgaagaacgctgttgtcactgtccctgcgtacttcaacgactcgcagaggcaggctacgaaggacgcaggggcaatttcgggtttgaatgtgttgaggattatcaatgaacccaccgctgctgccattgcgtatgggttggataaaaaagcttcgagaaaaggtgaacagaacgtgcttatctttgaccttggtggtggtacttttgatgtttcgatattgaccatcgaggaagggattttcgaagtgaaggccactgctggtgatactcatctcggaggtgaagattttgataacagaatggtgaatcactttgtttctgaattcaaaaggaagaacaagaaggatattagtgggaatgccagagcgttgaggaggttgaggacagcgtgtgagagagccaagagaacgctctcttccacagcgcagacaactattgaaatcgattcactatacgaagggattgatttctatgctacaattacgagagctaggtttgaggagatgaacatggatttgttcaggaagtgcatggagccggtggagaagtgtttgcgtgacgccaagatagacaagagtcaggttcatgaggttgtgcttgttggaggttccactaggatccccaaggttcagcaactcttgcaggatttcttcaacgggaaagagctttgcaagagtattaaccccgatgaagctgtggcgtacggtgctgctgttcaggccgcgatcttgagcggcgaaggagacgagaaggttcaggatttattgctgctggatgttacaccactcagtctcggtcttgaaactgctggtggtgtcatgactgtgctgattccgcggaacacaactattcccacgaagaaggagcagattttctcaacctattctgataaccagcccggggtgttgatccaagtgtttgaaggagaacgggctagaacaaaggacaacaatcttctcgggaagttcgagcttacagggatccctccagcaccaagaggagtgcctcagatcaatgtctgcttcgacatcgacgctaacgggattctgaatgtctctgcagaggataagactgctggtgtgaagaacaagatcacgatcacaaacgacaagggtaggttgagcaaggaggagattgagaagatggtgaaggatgcagagaggtacaaggcagaggatgaagaggtgaagaaaaaagtggaggctaaaaattcgcttgagaattacgcgtataacatgaggaacacgataaaggatgagaagataggagggaagctgagcccggatgagaagcagaagattgagaaggctgtggaggatgcgatacagtggttggagggaaaccagatggcggaagtggacgagtttgaggacaagcagaaggagttggaagggatctgcaaccccatcattgctaagatgtaccagggtgctgctggacctggtggagatgttcctatgggtgctgacatgcctgctgctggtgctggacctaaaattgaagaagttgactaa

SEQ ID NO: 728 - DNA, 1335 bp, Glycine max
attggtggttgttgattgaagcgaaggagcatgacctcgccacgcgccttcgcgtgacagatgccctcccgccacactccatcaccacaaccccaatcttcttttctctctcctctgccctaattcccattttcccaacttcaatttcattctcaaatattcctattccaattccaatcctattcctttcgattcctcttcccccagtttggaaattttgttgctggaagaattgcttaagggcatataactggctttaatcacatgggatcagagagtgcggctccaatggttgagacatcaaaaaacaggttcttcatctggattcagttcttgtaaacttgatttgcttcaggtcttcttctgataaaatgaaccaagggaaagtccccaggaaaattcacaaggctgaaagggagaaaatgaagcgtgagcatttgaacgatctctttcttgatcttgccagtgcacttgatctaaatgagaacaatggaaaggcttctatactgtgtgaaactgccaggttgctaaaagacttgctcagtcagatcgagtccctcaagaaagagaatgtcactctgttgtctgaatctaattatatgaccatggagaaaaatgagctgaaggaggagaattgtagcctagaaacccaaattgagaaacttcaaggtcagatacaggcaagactggctcaatgtaaacctgacctgaatgtacctccccatttggaacttgagccactggagcagacaaattttcctggacagaatctccaattgcataccatagaacctaacttgcagcaaggatctgcgattttggttgtcccctgtaatcctgatcttccaccttcttttccagctcctaatgttaccggggtcatgccgaaatctacatctgttgtcagtaaaccacatgccaggtatcccacacccgcagattcatggccatcacaactgcttggaaagcaaccaacttcaagttgatttgtattttctagagttttagtttcagtattggtttaacatgccaactagctttcccgatagcaaagcctctttggagctttcatgtataaattatatttattcaatgatctaagagagtctcactctcttctgtttcgccttatctaggtattcattttgggttcgagttagtacttagtacattctcctttactttgttttctcaggccttaaagccattagttacttgtagaaatgtttttgcggtgcttttccatggcaccatatccgatgtttacttggcacttagtttttaagaaactttttattcggcacttaacatgggaaaataattatttttaatttc

SEQ ID NO: 729 - DNA, 2401 bp, Glycine max
aattatgtaaaatagataataatgcattgcatggtaatgtaatgttatgtaacaacaacaaccaaccctatattaaatatgggtgagggcatggcattgggaaggggagaattttaatgggactttattatacaggtactttttgatagtaacctaactctcccactctccttttctcaagaggtgtgaccagaccccacccccctactcacacaaaggagaaaagattgaacactaacatcaaacaacaaacaaaaaagaccatggtaatggtaaaccctctaaattattggggaagacaaaagaatgagaaagaaagctgccctttctctcgctactcctcctaccccaaacaaaactttcccattacaaattgtggaatgaagaaagaatggcaagacaagtgagtagtagtatagtagtaattgacccatcaaacaaacaagcataacccatgtaattgttattgtagatagatagagtgagtgagtgagcactgtgttgtgtatatagtagtgtgtaaactctccccaacagacagacacgccgccactcaattatttctgtccatttcttcttcccatattgttctcgtgtgttgtgtgtgtcagtgttttggtgtgtgtgtgtgtgtgtgtgtgagtgagagaaagagaaaaaaagaaaagaaaaagagtgtcttggggcggttttggtttgagtttaacactttcatttcgaagatgccgcgcccagggccaaggccttacgagtgcgtgagaagggcttggcacagcgagcgccaccaacccgtgagaggttccatcattcagcagattttcagggtcgtcaatgacgctcacagtcccgcaaccaagaagaacaaggaatggcaggagaagctccccgtggtggttctcaaggccgaagaaatcatgtactccaaagccaattccgaggcagagtacttgaatcctgacacgctctgggaccgcctcaatgatgccgttaacacaatcatacggagagatgagacaaccgagacaggaggcctcttgcccccatgtgttgaagctgcacttaacttgggatgcaaagccgtgagaacttccagaagtgatcggcacaataacccaaggacttacctttctccaaggattcaacagcctccttgtctgcctcctaaacctgttgcggggaatcccttgaactatgcaaaagtcacaactcctgctgtgtcaccaattcctgtgccagattctatccacccaaatagcaggctcatgggttcctctaagtaccctttctcagaaggtatcccttctggtcatcaccagccattgacaatggaagctagaccctcattgaacttgggttcagtttaccctttgtactatggttatgaagccagagaacctgaaccttggacgactgctacagataccacgtgttctgatacaatctttgttggcagaccagtcatttcagtccctgagccttcaggaattggtctatcggaaaacttctcctatggtacattccatcacgttgcaaacagaatgagaaaagagactgctgttggcactcaggaggcagcaccagatagggaatgtgacttgtctttgaggttgggtcaatgtctgcatccgtgttcaagcagcaaaagtagttcagcatatgaagtagatgatgttggtttaggagtttcaccggaaagctgcaagtttagccatttatccttgcagagaaatagagagttctgtttttatcctagagagacaggttatggcaccattgagtccacttctggtaaatgtaatgtagagggtgaagatctgaatttagaggcaactcttcggaagcgcaaagcacctttatgtggtaacaacgaggaagatgggcaattttgccggaatccaggggtcccatccaatcgttttactagtaggccagaaagaaggaatgagggggatattgttgcctaccataaacaatctgtgcatcaacattaaatacatgctctgcaatgtggatcagaaatgcaattatttctcaagagtgcctttacacctgtcaactattgaactgctcggctaaagatttgctcaagatcctgtgtacttgtcggatccatggaccacatttagcagtctccatgcttggataatggatatggacaaggaatcagtttgaagtctatccgttcaagtgcatcaggaagtgagtgagtttcaagacatggtaaagggataataataataataaactttgagatgtcttacatggtaaagggataataataataataataaactgagatgtcttttgggatgattagcataattttctgccgtacccggggccgatttacaattggcttttgctcccttacattttggtgaatggacgtctaaaccgttaa

SEQ ID NO: 730 - DNA, 2100 bp, Glycine max
cctggagtgggaccctattattgttttcaagaaccctatttcatctaattttcatcattcttgtggatcataaattgcaatttctgcttacagtttctcttaatttttaaaattccaggaattcaaaagtttggtggttggattctgttttttgggcagcaatggcgaaagcacgcaagtcgcaagaagaaattgcgagtgaagccatcaagcatgctttgaaggctctgcggaagcgccatttgcttgaggaagctgctcatgctcccactgttctagctctttctagacccatcgtttctcagggctctgagtggaaagagaaagcagagaatcttcaaatggaacttcagcaatgctacaaagctcaatctcgcctgtctgagcaacttgttgtggaagtagctgagtccagagcttcgaaaacgtctcttcaagagaaagaaaatgcattggctgatctgcagaaggagttgactgaattgagggatgagtgctctcaattgaaggtggacttggaagaaaaaattaaatctctggaactggttgtcagtgagaattctgaacttaaagcacaactggagcagatgactactaaagccaataaagctgaagctgaaaacaagatgttgattgaccgctggatgttagaaaagatgaaggatgctgaacgcctaaatgaggccaacacactgtatgaagagatggttgagaaactaagggccagtggtttagaacaacttgcaaggcagcaggtggatggtatagttcgccgaagtgaagaaggtgctgaattcttttttgattcaaacatcccttccacatgtaaatacaggcttcgtgcacatgaaggtggttgtgcttccatgttgtttgagtacaattccagtaaattgattactgggggacaggatcggttagttaaaatgtgggatgcaaatacaggatccttaagttctactcttcatggctgccttggctcagtattggatctcacaatcacccacgataatcaatctgtcattgctgcaagcagctcaaacaacttgtatgtatgggatgtcaactcaggtcgtgtccgtcatacccttactggccacactgataaagtttgtgctgttgatgtcagcaagatttcaagtcgtcatgttgtcagtgctgcctatgatcgtaccataaaagtttgggacttagtgaaaggttactgcacaaacacagtaatttttcgcagcaactgcaattctctttccttcagcatggatggtcaaaccatattttctgggcatgttgatggtaaccttcggctatgggacattcaaactggaaagttacttagtgaggttgctgcccattcacttgcagtcacgtcactatccctttcccgaaatggaaatgttgtactgaccagtggaagggacaatttacacaatttgtttgatgtgcgatctctggaagtttgtggcacattaaaagccatgggaaacagagtggcttctaattggagtcgctcctgtatcagcccagatgacaatcatgttgctgctgggtctgctgatggatctgtctatatttggtcaatatctaaaggtgatatagtcagtactctgaaggaacacacttcctctgttctgtgttgtaggtggagcggaattgcaaaacccctagcttcagctgataagaatgggattgtttgcgtctggacataactggctttcatttctttggatacgtgcagaggtttgaccacactaaaatagataaaggtttgcatctatgcaagcggtgtggtactgctcaattgtacagttttcagattgggtggctgaattctttatcactgttttatgttcatacaaggtataatataccattcaaatcaggaaccatgtatatatattgtttttttaacgatgtttcatttaaataaactagtctcagtctcaagtgaaacatgagtagtgactaatttgtgatgaaggcatgaagcctttctgttttactaaatactaatgttgaattggcaaaatttgatgacatgtcactggcaggctgtcttcaacgtaaatatattgtccaattaactattaacaagtaacttaa

SEQ ID NO: 731 - DNA, 1140 bp, Glycine max
atgctctctctattccccatcttttccattgaattgatattaagcaaaaacaatatggaagtaaagaaagttttttttgttgctctatcctttgctttggttctgagagttgctgagagctttgagttcaatgaaaaggacctggaatccgaggaagggttgtgggatttgtacgagagatggaggagccaccacacggtttctcgaagcctcgatgagaagcacaaccgcttcaacgtgttcaaaggcaacgtgatgcatgtccacagttccaataaaatggacaagccttacaagctgaagttgaacaggttcgctgacatgaccaaccatgaattcaggagcatctatgctggctccaaggttaatcatcacagaatgttcagaggcacgccacgtgggaatggtactttcatgtatcagaacgttgacagggttccttcttccgtagattggaggaagaaaggtgctgtcactgatgtaaaggatcaaggccaatgcggtagttgttgggcgttttcaactattgtagctgttgaaggtattaaccaaatcaagacacataagctagttcccttgtctgagcaagaacttgtagattgtgacactacacaaaatcaaggatgcaatggtgggttaatggaatctgcgttcgagtttatcaagcaatacggtataactacagcaagcaattacccttatgaagcaaaagatggaacttgtgatgcatcaaaggtgaatgaacctgcagtgtcaattgatggccatgagaatgtccccgtgaacaatgaggccgcattgctcaaagctgttgcccatcaacctgtatcggtagccattgaagctgggggaattgacttccagttctattcagagggagtatttacgggaaactgtggcactgctctggatcatggggtagcaattgtgggctatggaacaactcaagatggaaccaaatattggacagtgaagaactcatggggatccgaatggggagaaaagggttacattagaatgaaaaggagcatatctgtcaagaaaggtctttgtggcatagcaatggaagcttcctatccaatcaaaaagtcctctagcaaaccaagggaacattcatcatatcctaaagacgagctttaa

SEQ ID NO: 732 - DNA, 2829 bp, Glycine max
catcttttatacatttactttactttattcgagagttggagaatagattagagagataagagggacactccggtaagcttacggcttccgtgcagtgcgagcgagcgaacgagaagttgtagttattgatttcaatttccaagtcccaaccataaacaaacagacaaatccatttcctcaacaaagaaacacacaccaaaccgcgcgaatcaaaagatggcggatccgatcccggcgccaccaagatccgccacggacctcttctcggatcctctcgacgcccacccgctgtggttcaaaccggcgtcgtttctctcccccgacttcgactccgaatcctacatctcggagctccgaaccttcgtccccttcgacacgctccgctccgagctaaacagctacctatcctccctcaaccacgagctcatcgacctcatcaaccgcgactacgccgacttcgtcaacctcagcaccaagctcgtcgacgtcgacgccgtcgtcgtccgaatgcgggccccgctcgtcgagctccgcgacaagatcgagcagttcagaggatccgtcgaggtctcgcttgtcgccatcaagaatcgcttgaggcagagatctgaggtggcctccgctagagagactttagagcttcttcttgatgcgtttcacgtcgtttctaaggttgagaagctaataaaagagctgcccagtgtacccaccgattggtcaaatggagatgtaaatttgtcagagaggaataacttaagcaatggagtttctgcgcagcatgttgagaatgaaatgattatcagagagactcaaagcatgctgctggaaagaattgccagtgagatgaaccgactaaagttctatgtgacacatgcaaagtacagaaccttccttttattgagaatatggagaagaggattcaaaatgcaagtgtaacagtagatgcaagcttgggacattgctttgtaaatggtttggagcaccgagatgcaactgcaattttcaattgcttacgtgcatatgctgctatagataacactaagagtgcagaagaaatttttcgagttactgttgtggctccattgatacagaagattatcccacatggatcatcagctgtggttgctggatcatttggggatggtctagaaaatgattatcaactaattaaggagttcattgataaagactgtaaatttttattggaaatttcttcagctgaaaattcaggtttgcatgtctttgacttcttagccaattcaatccttaaggaggttctctctgcaattcagaagggaaagccaggtgcattttctcccggaaggccaacagagttcttgaaaaattacaaatcaagcttagatttcttggcttttctagaaggctactgtccatccagatctgctgttgctaaatttcgatctgaagcaatttatacagaattcatgaagcaatggaacattggagtatatttctctttgaggtttcaggaaatagcagggtcactagattctgtgcttacaacatccagtcttgtccctgttcaaaattcagatgctggcgaagcaaattatcaaggtttaacattaaagcaaagtgttactttgttggagagtttgagatcatgctggagagaagatgttcttgtcctttcttgttctgacagattccttcggctatccttgcagcttctttctagatactcaagttggctgtcttctggactgactgctcgcaaaaaccataacacaagcactagccctgggtgtgaatgggccgtttcagctgtcatagatgactttatttttgttattcatgatataagatatttggaggagcaggttcatggtgattaccttcaacatgtgcttcagcttttgtcttcatgctcccctgatgttctggaatcaataaggcagagcattttactgagtggtcaatcattaaaatctgtagaaccgttagtcattaaagcagtggtggagtcactagttgaaaagtcagttgaggacttaagacaaatgaaggggataacagcaacctataggatgactaataaacctctacctgtgaggcattcaccatatatttcaggggtattacgtccccttaaggcttttttgggtggggagagagctacaagatatttggtcagtgaaactaggaatgaaatactcctctgtgctgcaactgagattactgaccgttattatgaattagctgctgaccttgttagcgtggcaagaaagacagagtcttcactccagaaaattaggcagagtgcacaaagacgagctggagccagttcagatatcttagataataatgtgtctgatactgataaaatctgtatgcagttgtttcttgatattcaggagtatgcccggaacctctctgcactgggggttgaagcagccaatattgcatcctaccgttcattatggcaatgtgtggctcctgcagataggcaaaacacaattaatctctaagagtttgctcctatggagttaaagcggcttgtagattgttttcctctgggtctagagtttccttttgtaacttaattttgaaatccattatatagctttacacaataatcacaggttatcatggttcttaaaagggaagaaaaaaattattttgctcgtaactgttatctttaaggttctctgtagttactacgatagcagatgtgatattctttgtggcattgtgtttcttatcatcattcttttaaattgctttttcaaacttactgccaattatttttttatggtctggcagattcattcaaatatagtcttgtatatatactaactccttcggttg

SEQ ID NO: 733 - DNA, 1989 bp, Glycine max
gtggcatttgggatctagcacaacttccattgccagtctccaataattcctttgtcgtgttccctgttgaatcctcatgtgccatccatgcaaagcaaactcatatatgttgtttttgcagattttgttgcactgctaattctatatattgcctctttaactagtagggtacctgtacctcatccacccatcttcaacttgtgataaatttctcctacctccattctgatatctcaactcaataataatagcacaccatggttgcttccctctcaaccctggttcttctattgtgtgttatttccacggtagcttggtactcatgcctctacttcctcaaactcaacaacaacactcagaagaagacccttccaccgggcccaccgggcctccctatcttcgggaaccttctatctcttgacccggacctccacacttacttcgccggactggcccagatccacggcccaattctcaagctccgactcgggagcaagctcagcatcgtcataacctcaccggccatggctcgcgaggtgctcaaagagaatgacaccgttttcgccaaccgcgacgtccccgccgccggaaggtcagcaacctacggcggctccgacatagcgtggactccgtacggaccggagtggcggatgctgcggaaggtgtgcgtgctcaagatgctgagcaacgccacgctggactccgtgtacgacctgcgccgcaacgagatgcgcaaaaccgtgtcttatttgtacggtcgagtggggagcgcggtgaatataggagaacaggtgtttctgacggtgatgaatgtgataacgaatatgatgtggggaggggcggtggaaggggcggagagggaaagcatgggggcggagttcagggagctggtggcggagataacgcagctcttggggaagccgaatgtttcggatttttttcccgggttggcccggttcgatttgcaaggcgtggagaaacagatgcacgctttggtgggccggttcgatgggatgtttgaacgaatgattgatcggcgaacgaaggtggaagggcaagacggggaaagcagagaaatgaaggattttctgcagtttttgttgaagttaaaggacgaagccggtgactccaagacgccacttaccatcatccacgttaaggcactgctcatggatatggttacgggtggaactgatacatcttccaacacaattgaatttgcaatggcagaaatgatgcacaatccagaaataatgaagagagtccaagaggagttggaagtcgtagtaggaaaagataacatggtagaagagtcccacattcataagttgtcctacttgcaagctgtgatgaaagaaactctaaggttacatcctgtgcttccacttctaatccctcattgccctagtgaaaccaccaatgtgggaggctacagaattccaaaggggtctcaagtgttcctgaatgtttgggctattcatagggatccttccatttgggagaacccacttaaattcgatcctacaaggttcttagatgcaaaatgggatttcagtggcaatgacttcaattattttccctttggatctggaagaagaatttgtgcaggaatagcaatggctgagaggacggttttgtattttcttgccacacttctgcacttatttgattggacaatacctcaaggagaaaaattagatgtgtcggagaaatttggtattgttctcaaaaagaaaattcctcttgttgccatccccaccccacgattatccaacccagatctttataattgaatgcaatatttatgtactaatgatgggaatatatctgtaatcaatactcaacagttcctaatccccaatgctacatatttctacttctatgttatttccgtggttcaagtttaggcattgagcaataaacaaggcctttataatttgtttctatctcatttaaatttctttactggaaagaattattttctactgt

SEQ ID NO: 734 - DNA, 1578 bp, Glycine max
ttactatcatggttccctccaatctcccatccaacggccccaaatcccccaagccccaaatctcatcacccaccgcacgatcataaatcatcccccatttcttcctaacaccacttcagatctggcaccaccaccccgaacctaaaaaacatcatagtattacagtactatttggcggtggcgatggtggaggcgcagacatggacgacgcggagaatgagcaaccctcgtcttgacacgaccaccacagacccagtagtggacattcccccgacaccgccgggggagcttcggaacagcttcggatccaaccctaacaacaacctctctccaaccctagtaaccgccctcatcatttcatcttggtacctctcaaacatcggcgtcctcctcttaaacaagtatctcctcagcttctacggctaccgctaccccatcttcctcacaatgctccacatgctatcatgcgccgcatactcctacgcctccatcaacttcctcgaactcgttcctctccaacacatccactctaaaaaacagttctttaagatcctcgcgctcagcgccatcttctgcttctccgtcgtctgcggcaacacctccctccgctacctccccgtctccttcaaccaagccatcggcgcaacgaccccgtttttcacagctatcttcgctttcttaatcacatgcaagaaagagaccggggaggtttacctcgcgctgttgccggtggtgttcggcatcgttgtcgcgagcaacagtgaacctttgtttcatttgttcgggtttttggtctgtgtcggttccaccgctggtcgtgctttgaaatccgttgttcaggggattttgttgacttcggaggccgagaagcttcactccatgaacttgcttctctacatggctcccttggcggcgttgattttgttgccgtttactctctacattgaaggaaatgtgttggctttgactgttgagaaggccaaaggtgacccctttatcgtgttcttgctgcttgggaatgccaccgtggcgtatttggtgaacttgacgaattttcttgtcacgaagcataccagtgcgttgacgctgcaggtgttggggaatgcgaaggcggcggtggcggcggtggtttcggttctgattttcaggaatccggtgacggttatgggaatggcggggttcggaatcaccatcatgggggttgtgctttacagtgaggccaaaaagaggtccaaagttaccactcattgatgtttcttttttggctttaacaccttattcttcggggacaaaccacgaaaaactaaggggacttaagggaatagcagcagctctcttaacatcatcagagactagagccgttaaagcacaggataattcatccaaaaggaaggaagcccaacttctttgatggccaaatttagcagcccagtcagcagcagaatctacttccctgctaatgtgcacaattggatataagatttttcatttagttacgaatttacaatttagtgaccgattatcaatttatcaaagtctaatgcaatgaaacgaataattaaacaatgatcactcttc

SEQ ID NO: 735 - DNA, 1164 bp, Glycine max
atctcacaaagcattctatcattacatagtcattacttcattacattggtcactactaatcacttgctgcattttctttcctactcttcacccttgagaatttgtcatttggacatggaacttagttttaagcaccaacttggccttgcttgtgttgtacttcttttacctgcattgtgtagctcacaggactcttttactgactccagagcaacatattatggtagccctgattgctatgggaatccaaggggagcttgtggctttggcgaatatggaaggactgtgaatgatggaagtgtggcaggagtgtctaggctatggaggaatggaagtggttgtggtgcatgctatcaggcaaggtgcaaaataccacaatactgtgatgaaaatggagcatatgtggtggtaacagactatggtgaaggagacagaacagacttcataatgagtccacgcgcctactcgagattgggacgcaacgcggatgcatctgcagagttgttcaaatacggtgtagtggatattgaatacagaagggtcccctgcagttacactggttataacgtggtgtttaaggttcatgaacacagcagaaaccctgactactttgctgttgtggttctctatgttgatggaacatacgatgtcactgctgttgagttgtttcagcaagattgccaagaatggaagccaatgcgcagggcatttggggcaatgtttgactatagcaacccaccaaacggtgagatctacttgaggttccaagtgagtggcagtgcagggctttattgggtacagtccaagaatgctatctctggtgattggaaggccggagcaacatatgacaccaatgttcagcttaattaggaaggaaagaagcactttgagatcccttgaacggattagaaatagataggcactagtattcaatttgtttctgtttagtttcactctaagaatgtttgtgtgtagtgtgtactgttgtgtgtctcttttgttgaagactaaaataatggggattcatgtacttccatcttagattacatgaatttgaataaaataaacatggtacccttttcctacattggtataacagtaaaggcaagtttccatcttgatcaaggttacatgaatttgaaaaggaaaaactcccttttcttc

SEQ ID NO: 736 - DNA, 1221 bp, Glycine max
atggcttcctcactcttccaaccttctccgtcttccgccatgactctctcttcttcttctacttcctcttcctcttctctcttcaccggcactctccgaaccttaggtttcgttgatcattcccgcgcgagaatctccgcgcctaacaccgtgaaatgtgacatgtcggaatcgtcgaatttcgtcaacgggaaaccgatcattccggttctcaacgaacggactctgccgaagttcatggaatccgcgagggaggcgaagaccgtcagcagaaacagtaaccggttgaaattgttctctggcagggccaatcccactctctctcaggaaattgctcggtacatgggcctggaactcggaaagatttccatcaagcgatttgctgatggtgaaatatatgtccagttacaagagagtgttagaggttgcaatgtttaccttatacagccaacctgccctcccgcaaatgagaatctcatggagcttaaaataatgattgatgcttgtcggagagcatcggccaaaaatatcactgctgtgattccatacttcggatatgccagagctgatagaaagactcaagggcgtgaatcaattgcggctaaacttgttgcgaaccttattacaaaagctggggcagaccgtgttcttgcttgtgaccttcattcagggcagtccatgggttactttgatattcctgtggatcatgtacactgtcaacccgtgatccttgattaccttgccagtaagatgataagttcaagtgacttggtggtggtttccccagatgttggtggtgttgcaagagcacgtgcttttgcaaagaaattatctgatgcacctttagctattgtagacaagaggcgccatggacacaatgttgctgaggtgatgaacctgattggtgatgtaaaaggaaaagttgctgtaatggtagatgatatgatcgacactgctgggaccattgctgagggtgcagcactcttgcatgaagagggggctagggaagtgtatgcatgctgcactcatgctgttttcagtcctccagcaattgagaggttgtccagtggcttgtttcacgaggtgattatcacaaacaccattccagttgcggagaagaactattttccccagttaacgattattactgtagcaaaccttttgggtgaaactatttggcgtgttcatgatgatagttctgttagtagtatttttcagtga

SEQ ID NO: 737 - DNA, 2020 bp, Glycine max
ctttacttcaataaatagcaagtatggtcgcgtcggatagcagtaaataaacttttgagcattcggaaatcagcagtagtaagtaagaaagcttttgtacctacaaacaataattcaacttggatcattagttcattacacagtcgaattctgttttcgctttgaagttcgaaccttgttgtacccttattctaggttccgcaccccgcaaaggaacccgaacctgccatgtgctcgtcgcattccccgaaccaccgttcgaaatgcagagctccagcacctgccaatgccatcatcttcctccttgtaccactcctctgttccctctccttcattaacgtcaattcccagattctagaagcatgctctgccgctacggattgtgggccaggtttgttctgtggcaattgcccctctttgggcttgaagcaacccatctgcaccagaggccaagtcacacttcccacttccattgtcaatgggttgcccttcaacaagtacacgtggatagtgacccacaattccttcagcattgtcgatgcaccgcctttgcccggtgttcagagaattaccttttacaatcaagaagacactgtcactaaccagttgaggaatggagttaggggactgatgttggacatgtacgacttccagaatgatatatggctctgtcactcatttcgcgggcaatgcttcaacttcactgcatttcaaccggcagttaatactttgaaagaagtggaggcgttcttgacggaaaatccaactgagattgttaccatcataattgaagactatgtgcacactccaaaggggttgactaatgtgttcacaagtgctggactggataagtattggtttcctgtgtccaagatgccgaaaaagggtgacgattggcccactgtgacggagatggttcaagcaaatcaccgacttgttgttttcacttccgatgcttcaaaggaagcaggggaaggaatagcttatcagtggaagcacatggttgaaaatgagtctggagatcctggagtgcaacagggttcttgtccgcacagaaaagaatcaaaggcattaaattctaaaagtcattcacttttcctgatgaattactttccgacatatccagttgaagctgactcttgcaaagagcattcagctccacttgctgagatggtcaatacctgttacaaagctgcagggaatttgatgcccaactttatagctgttaatttttacatgaggagtgatggaggtggtgtttttgatattgtggataaaatgaatggccatacactgtgtgggtgtagcactgtcacagcctgccaggtgggtgtaccctttgggtcttgcaagaatatttctgtacctagtacgagtccagtgactaatactgctggaagctttactggatctgttcagttctctaaatcagcttcagctgtccatcttccaaattgtttgcttgtcgtcttttacttcctgcaaagtcttgctgcaactatgatgactataagcactgttttataacttatgtaaggtagtctttaaagaaggatctctagtatcttagcatgtacactgcagtattgtctcaagctgtgaaatgtcatggaactgttactaggttagaaaaattagatatagacaaattcttgtttcttgctgaggttatgttcaaggatctgtgaagttatttgagttggtagtcatgagagaccaagaatttatctggagctataagtagttcaggtatgttatagttatacttatattcttggatgtacaaatcaaattctagatattgcaagtatgcaactctggatgcatcactttctttcttttctctcattgcgcaaaggtgttttccaatttgcaacaattgtttttggcaaaattactttacagatactgatgttaataaggtattggcgtgaattaatggctgtttatgaaatttaattcatttgtgttaaagaggctacaaattagccaagttaaagaacatctaacctaaactctg

SEQ ID NO: 738 - DNA, 1829 bp, Glycine max
ctgtctcgttgttggttccaccaatttttcttgcttgcagttggttgcttccgttccaacccaatccactatattatttttatctgttctctttcccaaaccaatacacgccatttttcatttctcagagagtcttcccgtctcttcctcttcacttcttataccgtcgcccccaaacgacgccgttttctgttctcttatgtaaacgccgttcgagaacaaaccaaaaaaagaaaagaaaatcagttattgccgttgttgttttgtttccggttcggtttatttcaatggatcgggcggcgttgacggttggaccgggcatggacatgccgatcatgcacgacagcgaccgttacgatctggtacgcgacatcgggtccggaaatttcggcgtggcgaggctgatgcaggataaacaaaccaaggaactggtcgccgtcaagtacatcgaaaggggtgataagattgatgaaaatgtaaagagggaaatcattaatcacaggtctctgaggcatcctaacattgttagatttaaagagctttaatgtttttggagtgtcttgcgacggcaattgtgaccgcatatgtttgcaatttcctgcactacgatgaaaccacaaccaggatcacgaccaccaccattgcttaaaaccttgatatttttataattttatattatattctacgaatgtgtctgtatagaggaggggcaatcacatttatttgtgatgttctatataattacacgcaggtaattttaacacctactcatcttgctattgtaatggaatatgcatctgggggagagctctttgagaaaatctgcaatgctgggcgttttaccgaggatgaggctcgattcttctttcagcaactcatatctggggtcagctattgccatgctatgcaagtatgtcatcgggacttgaagcttgaaaacactttgctggatggaagcccggcacctcgtttaaagatatgcgattttgggtactccaagtcttcagtgcttcattcacaaccaaagtcaactgtgggaactcctgcatatattgctccagaagtattgctgaaacaagagtatgatggcaagcttgcagatgtctggtcatgtggagtaaccttatatgtgatgctagtgggagcatatccttttgaggatcctaatgaaccaaaggactttcggaagacaattcagagagttcttagtgtccagtattccattccggacggtgttcaaatatctccagagtgtcgccaccttatttcaaggatctttgtttttgacccggcagagagaatcaccatgtctgaaatctggaaccatgaatggtttctgaagaatctcccggcagacctgatggacgagaagataatgggcaatcaatttgaagagccagaccaacccatgcagagcatcgatacgatcatgcagataatttcagaagctaccgtaccagcagttgggacctattcttttgaccagtttatggaggaacaaatttatgacttggaatctgaatctgatgctgaatctgatcttgatatagatagcagtggggagatagtgtatgccatatagtttgatcttagttacacttgaaagacaacaacatattaaatggagagagcattttcagcatcaagagatatatacgtggtgcccgcattttctgtagattagcatggataatacaaacttcatgttaatatttatgtattcagtgttggttgctgagggaagaaatgattgttaccctttgctcacttccaggggaatgcttgctttatatataatattatattatttaaattaacctttggacaat

SEQ ID NO: 739 - DNA, 2129 bp, Glycine max
tcgtacattgcagctttctttaacaagaagaacacgtaaaaaaatattatttcttagaaaagcacatccataggaagcatcgctcgtgttatttcaaattaaggactcgaatagttaagttattcatggaagagatggcacaacaagtaaagcgtccttttggtgttcctgaagagccagaattcactgttgggttggatgcaccattgagggagttgaaaatggaacttcttaaagaaggtgtgtccatcattgtgctgactggtttaggtggatcgggaaaaaccactttggctacaaagctttgttgggatgaacaagtcataggttcattcaaggaaaatattttatttgtcaccttctcaaaaacacctaagctgaagattatcgtcgaaagactatttgaatattgtggatatcaggtgcctcagtttcaaagcgatgaagatgtggttaatcaatcgggacttttgctgaggaaaattgatgcaagtcctatgttgttggtcctggatgatgtctggcctggctcagaacccttagttgagaaatttaaggttcagatgccagattataaaattttggtgacttcaagagttgcatttcctagatttggctctccatacatcttaaaacctcttgttcatgaagatgcaatggcccttttttgtcaccacactctcttaggaaaaaacagctcaaatattcctgaagaagttgtccaaaagattgttagacattgcaagggcttaccgcttgccattaaagtgattggtagatcactaagtaatcaaccttacgagttgtggcaaaagatggtggagaaattgtcacaaggtcattccatacttgattctaacactaaattagttgcttccctcaaaaagatctcagatgtcttggaagataattccatcatcaaagagtgcttcatagacttagctttatttcctgaaaaccaaaaaattcctgttgctgctcttgtggatatgtgggtagagttgtatggactagataatgatggcatagtaatggccaatgtcaacaaattagcttccatgaatctggctaatgtcttagaaacaaggaaaaatacaagtgacacagacagttactactacaataaccatttcatcatccttcatggtattctaagagacatcacaatttatcaaggcacccaggaacaagttgaactgagaaaaagacttatgattggcataactgaaaataaaactgaatggtggctaattagagaaaaacagcaaggcatgatgattcgcatattgtctatatcaaccgatgaaacttgcacatcatattggtcccatctgcaaccaactcaagccgaggttctgattttaaaccttcaaactagtcggtacacctttccaaagttcttgaaagaaatgagtaaactaaaagttctgatagtcatacgtcatggtttccatccttctgaaatgaagaattttgagtcgcttgactcattatccaacctaagaagaatgagattagagcggatttctgttcctccctttgtcatgttgaagaatcttaaaaaattatccctttacttttgtaatacaagacaggcttttgaaaacggaaacatgctaatttcagatgctcttccaattctagaagatttgaatattgactattgcaatgatatggtggaattgcctacggggctatgtgagatcacctccttgaagatgctcagtattactaattgccataagctttcagcattgccccaagaaattggaaatttggagaatttgaaacttataaggctaagttcctgtactgatttggaagggataccaaattctattggaaggctttcaaatttaaggcatatggacatctcaaactgcataagccttcctaatttgccagaggactttggtaatctttgtaatctaagaaatctgtacatgacaagttgtgcaaggtgtgaattgccaccctcaatcatcaatcttgagcatttaaaagaggtggtatgtgatgaagagacggctgcttcttgggatgctttcaaacctatgcttcccaatctaaagatagatattcctcaacttgatgtcaacttgaattggctacatgaaattcactcctaa

SEQ ID NO: 740 - DNA, 681 bp, Glycine max
atgttagaaggtcccattccagatggatttgggaaagtaatgaactctcttgaagttcttgacctctccggtaacaaactgcaaggcgagattccatctttctttggtaacatgtgtgcattgcagagtttatacctctcaaataacaagttgaaaggggaaatttctagcttcttccaaaattcttcatggtgcaacagatacatatttaagagcttgtatttatcttataaccggttgactggcatgttacctaaaagcattggattgctatcagagttggaggatctttacttggctgggaattctttggagggtgacgttactgaatcccatctttctaatttttccaaattacaatccttgtccctatcagagaactcgttgtctctgaaattggctataatttcatcggcggggtttgtggatgcacaggatgagtttgtggagacgcagtactataaagaattggcatccattgacaaacaacatcacacgacagtgagtgggttcataaaggcagcgagagaaggaggggaaggtgaatatgagattcagttgcccaataatcatgttaatgctgctgaaacccaacccaggtcctataaaagcaaccctgccactaacgattgggttcctaactctgatgaacatcagccaaataggagcgagagtacttga

SEQ ID NO: 741 - DNA, 1413 bp, Glycine max
atgggaagcatgcacatagaaaccccagaaacttttgctgatggtagcaaaaacttcgatgatgatggacgagctaaaagaactgggacttggattactgcaagtgctcatatcataacggctgtgattggttctggagtgctatctcttgcatgggcaattgcacagatgggttgggtagctggtcctgcagtgctctttgtcttctctttgataacatacttcacctccactcttctcgctgactgttaccgttcacctgaccctgtacatggcaagcgaaactacacatattctgaggttgtcaaagccaacctaggaggaagaaaatttcagctgtgtggattggctcagtatataaatcttgttggtgtaacaatcggctacactataactgcatcacttagtatgggggcggtgaagaagtcgaactgtttacacaaacatggccatcaagacgagtgcaaagttaaggacaacgcttttatgattgcttttgcctgcatccaaattcttctaagccaaataccaaacttccataagctctcttggctctctatcgtagcagctgttatgtcttttgcttattcttccattgggcttggcctttccatagccaaaatcataggtgggggacacgtgcgaacaaccttaacaggggtggaagtttcgggaacggaaaaggtttggaaaatgtttcaagctatcggtgacattgcctttgcttatgctttttctaatgtcctaattgagatccaggacacactgaaatcaagcccacctgagaacaaagtcatgaagagagcaagtttgattggcattatgactacaacattgttttatgtactatgtgggtgcttaggctatgctgcatttggaaatgatgcaccatctaatttcctcacaggattcggcttctatgagcccttttggctaatagactttgccaatgtctgcatagcagtgcacttagttggggcataccaggtctttgtccaacctatatttgggtttgtggaaaagtggagcaaagaaaattggacagaaagccaatttataaatggcgagcatactttgaacattcctctatgtggaagctacaatgtgaacttctttagggtagtgtggaggactgcatatgtgattatcactgccgttgtagctatgttactcccattcttcaatgactttttggcccttattggtgcactctctttctggccattgacggtttacttccctatagagatgtacattaagaagtcaaatatgcaaagattttccttcacctggacttggctcaagatattgagttgggtttgcttgatcatttctattatctcacttgtgggttccatccaaggcctttcggttagtatcaagaaatacaagcccttccaagcagaacaatag

SEQ ID NO: 742 - DNA, 2327 bp, Glycine max
aaagatactgcaaggtaacaccgctaggaagcaacggaagagtgcatgagagagcctttgcctttgtgtgattgtgaccccgttgtttcctctttccctccgtcaccatccagcaaaccccatacggcgccgtttccctctcctctatcgtttccttcgcttcttccctccgatgcgcttctccatctcattccgcgttgtcgtttaagtcgcgctttgcgattcttcgagtcaacgctcccgtttcgcttctcttagttctcgttttgtcgattcatacgcataaaaaagcaccctcttcacgcgctttctttcgtcactctgtcaggttcaagttacactttgccgttgttgatggcacgacctgggagcctaaacggcagtcagcatgttatagaaatagctgggagcgcctatgcttccacatcgtctgcatcacatcatgatagacattttaatggcacagatgtgacgcagcatgaagaaagaattagtggtgcaaggatgcctcctctttctcagccttcggtttcagcaactagtgtatctaatgggtcaaatagtaggaattcatcgtttataagacgtggggatactcggcggaataggagtcctgtgcattcagggttatggatatctattgagctggtcctactagtgagccagattgttgcgtctatcattgttttgtctttgtcaaggcatgaacatccacgtaccccattgtttcattggatcattggttatgcttctggatgcgctgctaccctccctctgctttattggcgttattatcatcataaccatatgcgagagcaagattcatctcaatcaaggcaatcatctcctcggattaatgatccttcagggacacttcttttcagttccagaactaacagtggagaagatggtcaggctgctgttgcatcctccagaagcaatcaagcttcattattgatgaatagaagaatgaagacactagtggaatacttcaaaatatctttagattgcttttttgctgtatggtttgttgttggaaatgtatggatctttgggggacattcatctgttgaagaagctcctaatttgtacaggttatgtatagtgtttcttgcatttagctgcattggttatgccatgcccttcattctctgttcaacaatctgctgttgtctcccttgtataatttctatccttggggttagagaggatatgtcacaaaatagaggggcagcttccgaatctattaatgctttgccaatttacaagttcaagacgaagaaaaataaaagaaatggtgatagcaactcagctgctgccgaaggtggagttgtggctgcaggaactgaaaaagagcgtgtgatatctggagaagatgcggtttgctgcatctgcctggcaaagtatgagaataacgatgagctgagagaattgccttgttctcatcttttccacaaagactgcgttgataaatggttgaagataaatgcattatgccctctttgcaagagtgatgttggtgaaaacttaaccggatcagtctctggagaagatgccagccaacaacggggtgagagcagggttgagaatggcctcacgaatacctcagtctagtctagttatatagaaatatacaatttgggtcctctccttttcccttagaactggagaatctactggcaagttacgacagtcaatgagagaaagaaccgatcacctatttacaaaaactggttgatgagagaaagaaccaatcacctatttacaaaaactggtggaccagaccctgcacaggtaatggtgggtaactaatcaccttatgaaaccggtggttcttgcacaggcaatggtaggttcctatgcaataaactgtatttttctctcatgacaagaagctcgtcttctcaatgaaaaggaaataatctgaagccccttttatacatatgcacactttgtacttttgtaaagcttttttttttttctatgcactacactctttggaaggatgtttgattgaggtcatccattccatatcatttttgtgatgtgttttctttttcttgttggaactgtaagttggccgatacaaggcatcaccttctgtagtctggtgatgcagctgattgttcaagggacgctcgtcatgtccataatctgtgtggtattgagaatgggaattaaagcgtatgatttcatgtaaatgggtcacaggaatatatataagtgaagttagtgccattttcatcatgtggcaattgtcatgtctttgtcaatattttttttctagttctggatggttatttataggcattttactagagactaca

SEQ ID NO: 743 - DNA, 2465 bp, Glycine max
aacctaaaaatataagcaaaacaatttttgcttccattctttataatctcttgcaaaaggaaattgatcctcaaggaagggaaaaatggagctacataaatggcctttcttgctttgagatttactcataattttctaacaactccttccaaatccattgccactcgaactaatcatcatatttaaccactacttgatctaaatttcctagtggggaattcatttttgtacttacatagttcaggtaccctctccatttcaggcattgttgttttttcctaacgttattactcaagggatatggatgtttggagtcttcaaaagttggtgaagacagcaccatctaaagcattggtcatcagaatcaacttggtctgtcttgccatctttctggtcgtctatgcaacctttcttctccgtccatcttcatccgtctatttcgagaatgcagcctcccttgtccggtgctccttgcgtgagtgccatcacaagggagaaaaaagcataaagatgaaagcagtgttggagaggaatgaagataggagggcaaagcagaacgcgagtaagatagaagtgcctagtttctttggcgaaatggggaaaggaatgaagataggaatggtgaacatgcaagaagatgatgtgagtgaatggagcacccttggagaaacaagccacgtttatttcgagaaagtgtcacagtttttcaattggacagatttatttcccgaatggatagatgaagaggaagagaccgatgttccatcgtgccccgagataccaatgccggaattcacagcatatgaaggcatggacgtgatcgtggccaagttgccttgcaattacccaaaggaagggtggggaagaaacgttttcaggttacaagttcatcttattgtggcaaatttggcagtgaagaaggggaagagggattggaattggaagacgaaagtggttttgtggagcaagtgtaggccaatgctggagctgtttcgatgcaacgatttggttaagcaggaaaatgagtggtggtattatgaggttgatgcaatgaggttggagcagaaagtttctttgcctgttgggtcctgcaatttggctctgcctctatgggaacaaggaatcgacaaggtgtacgacacgtggaacctggaacaaagcgttaaaagcgaagcgcgatcaaaacgtgaggcctatgcaacagtgctccactcctcagaaggctacgtgtgcggcgcaataacgctagcacaaaccctgctccaaaccggaaccaagcgtgacctaatcctcctcctggacacctccatctccgtcgcgaaacgccgctccctcgaactctccggctggaagatccgactcataacccggatccgaaatccgcgggccgagaatggcacctacaacgagtacaactacagcaagttccgactctggcagctcacggattatgagagagtgatcttcattgatgctgacatcatcgtcctccgcaaccttgatattctcttccacttcccacagatgtccgctactggtaacgaccagtccatcttcaactccggcatcatggtactcgagccctccaactgcacattccacgttctcatgtcgcgccgccacgatgtcatctcctacaacggtggcgaccagggtttcctgaatgagatcttcatgtggtggcacaggcttccgcgacgggtgaactacttaaagaacttttgggccaacacgacaatagaggcaggtaggaaaaatgcaatgttcggggcggagccgccgaagctctacgcgattcactatctagggctaaagccatggcattgttatagggactacgactgcaactgggatgtggaggatcagagagtgtacgcgagcgacgtggcacatcgacggtggtggaaggtgcacgatgctatggacgagaacttgcaaaagctgtgtaggttaacgaggcaacgaagaatggagttgaactgggaaaggagaaaggctgggaaattagggttgccagatatgcattggaagatcaatgtcacggatcccagaagagctggctcgatgttgattggctaggttaattaggttctagttgttgtacaattacaccacattcttttttctttttttttttggatttggggtatttgtttttgttttaattcatgattttacgtactgagacatttgtggaggggctttccatgcggtttatttatttctgtgaatagggtagagcattagatggttagtcaattaaggaaacgggaataataaaaagaaattcattacagtttttgtcgatcttgattcttcaatatattttttttttccatcaaatttaattgatcaattcttttagcatgtgtttggatcacgttcaacaagctcgttttcacactaaaattaattatgtcaaaaggagaaaaagacgtaaaagctataagttgcattcgatagac

SEQ ID NO: 744 - DNA, 2470 bp, Glycine max
aacctaaaaatataagcaaaacaatttttgcttccattctttataatctcttgcaaaaggaaattgatcctcaaggaagggaaaaatggagctacataaatggcctttcttgctttgagatttactcataattttctaacaactccttccaaatccattgccactcgaactaatcatcatatttaaccactacttgatctaaatttcctagtggggaattcatttttgtacttacatagttcaggtaccctctccatttcaggcattgttgttttttcctaacgttattactcaagggatatggatgtttggagtcttcaaaagttggtgaagacagcaccatctaaagcattggtcatcagaatcaacttggtctgtcttgccatctttctggtcgtctatgcaacctttcttctccgtccatcttcatccgtctatttcgagaatgcagcctcccttgtccggtgctccttgcgtgagtgccatcacaaggtaagggagaaaaaagcataaagatgaaagcagtgttggagaggaatgaagataggagggcaaagcagaacgcgagtaagatagaagtgcctagtttctttggcgaaatggggaaaggaatgaagataggaatggtgaacatgcaagaagatgatgtgagtgaatggagcacccttggagaaacaagccacgtttatttcgagaaagtgtcacagtttttcaattggacagatttatttcccgaatggatagatgaagaggaagagaccgatgttccatcgtgccccgagataccaatgccggaattcacagcatatgaaggcatggacgtgatcgtggccaagttgccttgcaattacccaaaggaagggtggggaagaaacgttttcaggttacaagttcatcttattgtggcaaatttggcagtgaagaaggggaagagggattggaattggaagacgaaagtggttttgtggagcaagtgtaggccaatgctggagctgtttcgatgcaacgatttggttaagcaggaaaatgagtggtggtattatgaggttgatgcaatgaggttggagcagaaagtttctttgcctgttgggtcctgcaatttggctctgcctctatgggaacaaggaatcgacaaggtgtacgacacgtggaacctggaacaaagcgttaaaagcgaagcgcgatcaaaacgtgaggcctatgcaacagtgctccactcctcagaaggctacgtgtgcggcgcaataacgctagcacaaaccctgctccaaaccggaaccaagcgtgacctaatcctcctcctggacacctccatctccgtcgcgaaacgccgctccctcgaactctccggctggaagatccgactcataacccggatccgaaatccgcgggccgagaatggcacctacaacgagtacaactacagcaagttccgactctggcagctcacggattatgagagagtgatcttcattgatgctgacatcatcgtcctccgcaaccttgatattctcttccacttcccacagatgtccgctactggtaacgaccagtccatcttcaactccggcatcatggtactcgagccctccaactgcacattccacgttctcatgtcgcgccgccacgatgtcatctcctacaacggtggcgaccagggtttcctgaatgagatcttcatgtggtggcacaggcttccgcgacgggtgaactacttaaagaacttttgggccaacacgacaatagaggcaggtaggaaaaatgcaatgttcggggcggagccgccgaagctctacgcgattcactatctagggctaaagccatggcattgttatagggactacgactgcaactgggatgtggaggatcagagagtgtacgcgagcgacgtggcacatcgacggtggtggaaggtgcacgatgctatggacgagaacttgcaaaagctgtgtaggttaacgaggcaacgaagaatggagttgaactgggaaaggagaaaggctgggaaattagggttgccagatatgcattggaagatcaatgtcacggatcccagaagagctggctcgatgttgattggctaggttaattaggttctagttgttgtacaattacaccacattcttttttctttttttttttggatttggggtatttgtttttgttttaattcatgattttacgtactgagacatttgtggaggggctttccatgcggtttatttatttctgtgaatagggtagagcattagatggttagtcaattaaggaaacgggaataataaaaagaaattcattacagtttttgtcgatcttgattcttcaatatattttttttttccatcaaatttaattgatcaattcttttagcatgtgtttggatcacgttcaacaagctcgttttcacactaaaattaattatgtcaaaaggagaaaaagacgtaaaagctataagttgcattcgatagac

SEQ ID NO: 745 - DNA, 2678 bp, Glycine max
tttagattggaggcttccatgatattgattattgaatctgagaagctagctgtgtcttattctgcatccatggaccaggttggaattggaagctcttctatctatctctattctctagtctttttcgcacaagtcatttctttctacttccattcaccataacgaaactgcaagctactagtacatacatacataattcatctctctcacactctctaattttctctctctgtcccctaccactacgcaaaacactcatccaatataatattctttttatctcaagcggtggaacactcttctccaccagtacccccatccatcttcttcttcttcttctgtccaccatacatagtatttggctatttgtattatttatcatgttcattgcgcagtgaaaatttggaagtgttttgagtttggcatcttctgatgctgcttcatttataattattgtcatcaagtttcagtctcattctggatcagtgagctgattctcttaatgtcaagataaaaaaaacaacaacaaaggtttgatctttaattacccgaagcaattgatcacagtttcaatgaatttgtctatgaaatttgacaattgggtatgagtggtagtttcagatttttagcatagcttgaaaacatgaacagaagaagttttaggactaggaaagctccaattccgattcagtagcacatgaaaaaaaagtaattgaagtttggtatagtcagaagtcagaaaagggtacattcatgtcgtttgtgtgtttgaaaaacagtttgtacagtaatagcccgagctcattatttttattattaaagtatctgaggagagtatcagctttctaattcacaaactctggcttcagtttcaatgagataaaaaaaaaggtagatgatgcagggaagcttgagaaatgcaaataaaagtggaaaagcttctagcagagaaagaaaattggctttgcaacaagatgtggataggttgaagaagcagcttaggcatgaagagaacattcatagagcattggagagggctttcaacagacccttgggagctttgcctcgtcttccgccttatctccctccctatatactagctcttctggctgaagtggcagttctagaagaggaaattgttaggcttgaagagcaggttgtgcatttcagacaggatttgtaccaggaagctgtctacatgtcatcttctatgaggaaattggaaaattcagtttcagctcctccaaacaagtcaaatccaacattagatagtcccaagttggataaattgaagtctcttacccaaacagctggtaattcaacagcaacatctgaaactaagcctaccacaacactcactgaggatagacaagggaaagagaatcaatcatgtactaattcttccaagagcaggcagcaatcatccaatcaaatgaacaaaactccaattaaaaacattgacagtcaatcattgcagaaaaggttggatcatccaaaaagaaagcaagaaccaagggtgaacaaccagcaaattgcagatgtaagaaatcatagtccacataaaaattcaccagaagctcagagtccaaatataatttcagaaaatattctgaagtgcttatcaaacattctcttgagaatgagtgccgtgaagaatccaggttctacatgtgacatggcacccttgtgggatctaaagcctcaaaactgtgatgaagaagcagatttttgggatccatatggcatctgtttggaatttgggaagagggatattggtccatacaggcaattatgtgcaattgatgccaaatctttcaatccaaaacgaactgcaaatactttatttttactacatcggttgaaactactttttaggaaagtagcctctgtcaacttggaaaacctcaaccatcaggagaagcttgcattctggatcaacatctacaattcgtgtatgatgaatgcattcatagagaatggcataccagagaatcctcaaatggctgttgcactaatgcggaaggcaacaataaatgttggtgggcacgtgctaagtgcaacaaccatagagcatttcattttaagacttccttatcactggaaatttacgttttccaagggaacaaaaaatcatcaaatgacagcaagaagcatatatggactggaactgtcagaaccccttgtgacatttgctctctcttctggaacttggtcctctcctgctgtgagagtttacacagcatcccaggttgagaatgaactagaagtggccaaaagagagtacttacaggcagcaattggattttcaacttcaaagtttgctatcccaaagctgctggattggtatttgctgaactttgcaaaagacttggaatcattgctggattggatctgtctccagttaccaagtgaactggggaaagaagccattaaattccttgaggaaagaaaaaccgagcccttatcacaatttgtacaaattatgccatatgagttcagctttagatacttgatatgcacataatttcaccctcgttttctgtacattgcttcattgcaattttgtatacaacagtagatcatacatataaaaatgtacatgatcatctgttctctactccctttgggagaaatgttcagattccttcttaactaaagtgaataaaacaatcattgca

SEQ ID NO: 746 - DNA, 678 bp, Glycine max
cttaccttaccttacccacccaccaataccatttatatttgtctgtgttagcgaaagtgctttttatctttggtggctagtggtgaccaaattaaagcaaaggcactgaagggaagatgaaagacgaagatggccaaagccaaattgcaggggggaagggacagtacaagaagttgtggtgggtgtgatgttcggagcgtccgagatgctgctgtctccgaaattgccaagatgtccctccactctcttcctctacaccacctcaaatcacactccattgtgcagaatatcatgggatcaagaaaaatgaagcaagcagagagtagcatggacactacaattgacaataaccaataacaagacttgttacttttgctgttcaacatcggaacccatttgacactgatgtgcacacctcgacagactgaaattgattgtttaagagcagtacacacgaaaacactccctcacccgtgtctgagtattactttccaagttaataaaaaactattttgtataggtttcggcattgggatatatacaaccaaataattgtataaatattatgtatcccatcttgtatattacgtatttacgctagcaatgtcattgaatgaatgtaccgaagacaattgctttcttggacagttatcaaaaactgttataagttacaacgaa

SEQ ID NO: 747 - DNA, 2657 bp, Glycine max
gcccaaatagtattgtgagtgggtaataattactctcaatttcccttgtacctccctttattgctcgttagatcttttacaccactctcctcacttttgggtctatttgctcgctgttcgaacctgattctctgaacacgaggaggcagaggcaccaattgcaattttactttctttttattttattttccatactgtgtgtagtaaccgtacaatctcattctcaaatctcactcgctttttgtctctctaaacactcaaacactgcttcacttccacttcaacttcatcttcacaggagagaaacaaaccaacacgttgaagtgaagcttctcttattgttattgttattttgactttatttgttatgagttagtagaagagagaaatggacaaggctccaacaaaagtgaggcgtggaagcagtgcgttctcaaacgccaacaagcgacgacacaaacacaaactcttcggtgttttgagccgtggggaccttcgattctcgaagaaggaaaaggtgagaagcttgagtgcggtcggaacgccgtcgtcgaccttccaaatggcttgtattaatgtctctgaacagcaaacacatgaaccttcttcgaccgtcatcgccaccaccaacagattcaagcttcataagaatttttttaataactgcaacggtgcctctgttccacggaagctacgttcagaaaagttgaagcatacgatgcatggaatagaatctctcaaaaaggaaagtctaaagaagtccaaaaaacaaggaatgtggcgtgactgttcccctagagaaggagcttctgggcccatcacaaaagatgagcaagaggttgcggagactctctatgccttggctggaatgttccctcacaatgcctccaatcataatagtacggatttagatggcaaatttttgccagataattcatcagttttgcaagacttggaggataatgcgagtgctgctgctcttcaagattctattctagcctcagcaactgctcctgttgcaagtcctagttatcatgaaagttcagctggagaagcttcaaaaatcagttggttgaatgaagctgttggtcaaaaacaacctgattttcctgagagtgcaacgctcttgatgccatctcatagcacttctctaacaataaatcttcagaccatgcctgtggcggctaagcgtgaaaatagcaacaaagttgcattgcatgactctgagttatgtctagcaatgggattaaatatgcccaaactatcacggatttctcaagttgagaggaaaacagatgtggcgtttgaggcggtaagagacgtcgattgtaagcaacaacagcatttgatcaaggaacaaaaaggaaatggccttgcattatggccaggcttgtctccagtggcaccagcaggccaggcttatctgcagtcttctgctactaaggctcctgattggctggaagctgcaatccgtgcctcgaaaatggattcaatggaaacttcaacttgttcttctagggggagtatctttattcctaaaagatcatggaagaagtgtgcagctcatgttcacatcagtcatataatcaagagtctagaggtgccaaaaacacaggttttcaaagaaactgagttttttgaatgtcatcaaatgagagaacatgaaggaccaaagcgtggagttcttttaaaagtacacagctcaaacgaaatgaaaaatggaatcacttctactgtgaggaatccacatgaaagtaagaatattattcttcggcagcaatgccattatcgaaacatatcacaggctgctccaacacctgtggtacagtatggccatcaaaagcagcaaaatttcaacttcttgtccttgtcagcaggaagtaatgggttaaagctcgaaaataattataataaaataggaagtatgttggaaccattatcaaaattgcaagtgccttatttacagtcactagcacctctgcatgggggcataccaattcctgctgttcagagacagtatgcctcaacttcttaccttgatcagctttctgttgcaggaccagaggttcggttgcagcaacctcattattttggtaacccgttatacggaactcattatggttcaacagtctcacataaacaacaagagcaccaaagcttctggggggtgcaacaagcagaacaaggtaggtctacagtaaatttcaatattttgaggactcaatatcctaattggcaaagtggaaggcatgactcttctgcattgagtccatgtgcccaagccatccttccttgttcccctgcatcacaagaaatatttggatccaagatcacttcaatctctgggcaacagaagcagctacttgcccccttccaagacaaatggactagaccttcgtcatctcccttcattatgtgaagaaattagagtcactgcatatgcgattgtaaagtgatgagcaacctgaaaacgattcagttattttatacttctacacatccagcttttagggtatgtttgttttcgaggaaagaaataatatacaagaggaattttatactttattttgtgggatccacacttcttacattctactttaaataaataaatcttctatttctcttttctttatttttctcatctaaaccaaacaaac

SEQ ID NO: 748 - DNA, 3081 bp, Glycine max
agaaaggagcattataacaaaaacacatcagaagaagaagaagaagcagcagcagtagtaaggggaagggagaatagaaaacccagaatctcgacaagacgattcttttcttttgtccccgaagagaaagagagatcttatctcctcttcctacaatgcccattccaataactctctctttcaatctcacccctgccccttttcatcgattcctattcttattatttattattcttgcttagggtttccttggatcgtaccctctcgggggattgcatgaaatgagcatgagctctgatctcttcataccttccaattttgtgcttcagcatttctacttggagatttctcattcttaagtttcacatgagcatggaagaggattgtctatattaattcattctttactcagtcgcaggctggctcttcctttttcactcaaaggcaaaactgttcacttcttgttaccgaggatctgattgcagctctgccccaacacctaagcatatacttattgggttttagctcaaccatttaccactgtactaggaatcctgtttgtcagcttcagtgttccatgttcatttcattccttcatttctgatgatattagtttccgccgattgcatatttggtcaaggcaagtaaagtaatccttggtgctccccataatttgtgtttatagtcaataagaagcttatggaggaatattgaagctggaaatgaatgcggtgacatggtgcatggacaagagcatagttgctggttggttccctttctggaacagtgctactggaaactaattaaaaaattctcaattttacaaggaagatacaccggacatatctggactttgtgcaatgtcgcgctgctttccttttccaccaccaggatatgaaaagaaggctacagcacaggacgtggatgtactgacaaaggaaaagcacagagaaaaaaagcataaaaaagagaagagggacaaagagaagaaggaaagtaaggaaaagagagacaaagaaggaagggatggaaagcataaggaaaagagggacaaaaaagaaaaacacagagaaaaaaagaaagataaggacaaggacagagataaagataagagcaaaaccagtgctgcaattgagaaagactttccaggacaagctcagggtcccaatgcaggtaaattacatcaaaaggaaatcaaaccaaatgataagaaggctattttacttgaggataaactcaccaaacagtttgccagtaacaatggagagaaggttagagagaataatcatttggctgaggaaaacaaggattctaaattcctcctggagttggacaagaggattagggataatgatggaggagctgagaatcaattggctcaaaagtttacaactgcaggacacagaaagaatgatggggctgttagattggttactaagggtagtgacacctggcctgatggtaaggaaaggcttcaggataagggcattgatactagaaaggttgataggagaggaatctggggtgagtcccgaccagttggaaatgcaacagttcagaataatgctggaaaatttcatcccagggttgatgaaatgcccaaatctttggaaaataatatttacaaacctttggaagcaacagttgaaggaaaagagaggagggttaaggggaaaaaagatgataaacatggagataaaaagaaaaataaagagaaggggaaaaaaggacatgggaaggacaaagacaggagtaaagagaagaaaaaggaggagaaagcaaaggagaatgttgaacatgaaaacagagagcagcagaataaattaaaagaaagcagcaaagctggtacaataggttcaaattctttcacacaggtttccaggcacagctgtgagaaatctgctgttggggaaaatctcaagaaacggaaggacattgaatcaaatggaattatgcatgcaaatgacagttggcccagtaagttgccaaagccctctccatctctctctcatctcactgaaaatgggaggatattggaaccctgccaaatttcccttcagaatacatctgataggctagcagcagcctctaatatcaaggttgataacaaagaacgcaagataaatggcatcatcgaagctctaccatccacagtttcctcaaaaactcccactcccattgctaccatgccagctccagtcagtgaagcatctgcaaaaccacctcatccagatagcaaatacataagtcaggtatattccgtgcccaaagtagatgagtggtctgattttgatgaccaagagtggttgtttggcagcagccattggcaaggaagaacacctgcagtgaaatcttcagaggttgaggatacactacaggtatgggcagaagctgtgcatataaagccagcagatatttttgctctgccatttgtcattccatactgactgattgtttaggtggcacatgatacttcaaaaatacctgatctgctcaaggaaccctctatttgagaggaactacagcatctggagccatgaattgattcttattttctgatgcattcttttgttagttgcacactagcaacaaataatgtttgtcttgattttgagttggttggagggaagcatctgtcataagtgtttacatgtttggtgtattggcggaggcttgattggggcagtagttctcacttcacgcgacgacatagtaattcgtttacagattagacttcataaagaaaggcagccgcaggttgtggggaagagacgtgcaagctcgtgcaacttttttttttttttaaataatttttgcctagatcttttcctgggcagctagctagttctttctagttgagaatgagaatgtaagagaactagaccacaattttgttttgtaacatagaaatcctatttactagaatatgtatgatagagaggggggaaagggtcttggtagtcggattcatttattcggtttcctgtaaattttcttggttatttcatcattttgcaagtccttgctttcaatgggcagtgttgagttaaaaactattacaagggttatcatacaaccaaa

SEQ ID NO: 749 - DNA, 2067 bp, Glycine max
agagaggccaacgttagtggtaaacgaaaataaaagggtgaaagaaaactcgtccacgaggttctgtgtcatcctataagcaaagcaaataagagtgctccatttcctacaacactgtaacctcatcctccaattcccacacccactccttcccacaacactgtagcatagcagcagtggctaagattggactattgtcgttcattttttattccattgctgtcgtgtctgagaattatgacataaacatgtttttatttgcttaacaacacccaaacttatatctagcaggatttcatcgagaaattttgtattttttggcatattatcttgctgaaaatatattagatggccattgcaccttttggtaatacatcagctactcaatggggaattcatcctcagattttcgcgggatcgactgggttgggaaagattgcatcatccaggaacaatgttacaagcaggataaggtttatggttgccccatgttcgagctttttttcttgtcattccttgcatgcactatttgacaaaggttcatcgcaaactttgcaacatcgcaggggatcgaggttaatagttagagcagatgcagattactattctgtactcggggtgtcaagaaattccagtaaatctgaaattaagaatgcttatcggaagcttgcccggagttatcatcctgatgtgaacaaagaacctgatgcagaacagaaatttaaagaacttagtaatgcatatgaggtcttgtcagatgatgagaaacgatccatatatgacacatatggagaggctggacttaagggttcaggaatgggcatgggggatttcagcaatccttttgacctgtttgagacactgtttgagggcatgggtggcatggggggaagcagaggatcttggaatggagcagttgagggcgaggatgagtattacagtcttgttttgaacttcaaagaagccatttttggggtggaaaaagagatagagattcggcgattagagagctgtggaacctgcaatggtttgggggctaaaccagggactaaatcatccaagtgtagcacttgtggtggtcagggtcgggttgtcacgtcgacaaggactccattaggcatctttcagcagtccatgacatgctcttcttgcagtggaactggagaaacttcaacaccttgcagcacatgtgctggggaaggtcgagtgagaaagacaaagcggataagtctcaaggttcctgctggtgtggattctggcagccgtttaagggtccgaaatgaaggtaatgctggaaggcgtgggggttctcccggtgacctctttgttgttcttgaagttatccctgaccccgtgcttaagcgagatgacacaaacattttatacacatgcaaggtgtcttatattgatgcaatattggggacaacaattaaggttcctactgtggacggcatggtggatttaaaaatcccagctgggactcaaccaagctcaacacttgttatggctaagaaaggtgttcccttgctgaataaaaagaatatgaggggtgatcaattggttcgggtgcaagttgaaatccccaaaaaactgagcaaagaagagagaaaacttattgaggaactagctgatttaagcaaaggcaagactgctgccaccagtaggagataacttattgaggaacctgtatcctatgtatttctagcctcatttccttttatgatggatggttcattcttgaccttgagactcacaactcggggctgcagctattcatttcagaactgtggtgggattggttagcatatattgatagatgtaggttactagttttttatttatagacaggcagatatgaagagcagaagaaactagagatctttctttttctttggaacttattatatgccttagcaatgttattgtttttttaagggtgggggtggggaaggactacagctcaggtgcaatgccatctttattttctcaagtgttgtttttagacaaaattggaaatgtatactaatttatttaaagttatttataaagccaaaaaaacttattgtt

SEQ ID NO: 750 - DNA, 1631 bp, Glycine max
agagccaagggtagaatggtctgtgcatatttcataaattttacatttttctttccccaaacgcaacaaccaaagtgaagccaccttgttgagttgagagtcgtgtcgtgggggtacaatacattatacatcgcactcactctcattgattgatactaatccaagaccatatttaatttgccaaccgcgccagatcgccattactacaacaacatagactagtgcggtgcattccctcgtttaccatgctttcctaagagaaagagaaaagtaaaacccctcactactgatagattttcattcctccgaggaaaaaaaaaacatgtcggatgctttgatcaatggattggccggagctggaggagggatcattgctcagctcatcacatacccacttcaaactgtaaacactcgccaacaaaccgagcgtgatccgaagaaagacacgaggagtcaaggggccctcgaacgaatgtgccaggttgtaaaagaagaggggtgggaacggttgtatggaggcttgatgccatcggtagtgggtacagctgcgtctcagggagtttactattatttctatcaaatattcaggaacaaagctgaagcagctgcactacaacaaaagaaaatgggcgttggtgatggatcagttgggatgctctcctctcttgttgttgctgctttatctgggtgtgttaacgtgctcttgacaaatcccatatgggtagttgttacgcgtatgcagacacatagaaaagagtcgaacagaactccagctgatcagggtttgtttgttgccactgagcagccaattctttctgcagttgagcctcttccttatggaactagtcatgtgattcaagaaatctacggtgaagctggaatttggggtttctggaaaggtgtattaccaacattaatcatggtaagcaatccttccatacagttcatgctgtatgaagccatgttggcaaagttaagaaaaagacgtgcttggagtaagaagggtagcaacggggtaactgctttagagatatttcttattggagctttagctaagcttggagctactgttgtaacttatccgatcctagttgtgaaggcaaggctccaagctagacaggataaaactggagacaggagacaccattacaaaggtacatgggatgctattattaaaatgatccgctatgaggggtttaatgggttttacaaaggcatgggcacaaaaatcgtacaaagtgtgctggctgctgctgttttgttcatgatgaaggaagaattagttaggggggttcgtttcttgcttgccaaggatgctgtaaagccaaagaatctgtgattggaggccactagcttgatcaagatttcatgtaccatcttcagttagcaaattagttcaaatggtaggggaattagagtgattcaaacaacatattgaaatatggctttaactgtatcttgattattttcatcaggttagtttccatagaggaaattcatgccaaaaattacacactgggttcattggtttgtttcatgaacaagacagggttgtagatttgaagtatgctgctgaaacaaatattctttttacgaacgaatatcactatctgatttcattggcagctaaa

SEQ ID NO: 751 - DNA, 1617 bp, Glycine max
gtatatctcagttacatgacaaaaaaattcgaatctcttattccttcccgtgtggtggcagtttggtaataatacaaattattaacatatgaaaagtgtcatcgtcatcggaatgaatgtagacgcagcaggagttggctggctcaacgttgaacactgttccatgctgttaaagcctccgctctcactcaacttcagattttccccacaaacgagcattttccgggcacgaaactcgaggaattcgcgcatggcgcctccaatcctctcgctcgctcttccctcgaacaccggtcgagttctcagcattcaatctcacaccgttcaggggtatgttggtaataaatccgctgtcttccctctgcaactactgggatatgatgtcgatccaattaattccgtgcagttttcgaatcatacaggatatccgacgtttaagggtcaggttttgaatggacagcaactctgggatctaatcgaaggccttgaaggaaatgatttattgttctatactcacttgctaacaggttatattggttcagagtcttttctaaacactgtattgcaagttgtcagcaaacttcggtcaacaaacccaggtctttcgtatgtatgtgatccagtgatgggtgatgaaggaaagctttatgttcctcaagagctagtatcagtctatcgtgagaaggttgttccagtagcttcaatgttgactcccaaccagtttgaagcagaactactgacaggctttaggattcagtctgaaggacatggccgggaggcctgtaggcttctccatgcagctgggccttcaaaggtcataattacaagtataaatatagacgggattcttctcctcattggcagtcatcaaaaagaaaagggagagcctcccagacaatttaagattgttattccaaaaataccagcttattttacgggaacgggagatctcatgactgcacttcttcttggttggagcaataaatacccagacaaccttgagattgctgcggaacttgcagtgtcaagcttgcaggcagttttgcacaggacactcagtgactacaaaagtgctggacatgatcctgagtcaaccagtttagagattagattaattcaaagtcaggatgatatttgcaccccacaggtccatgatatgggaagaaaactgcatcatatttgatggatggaattcatgatgatattcatgtatgttggccataggagatggttgatgaccatatttgctagttgatgactctccagggaagttacgtgcccattcttggttctctaagccagcataaatagtttcactattctctaagccagcattaaaaccccattggggtccccagtgattttcgccaaaggggggaatcatatactgattttcatagtcactgtgattatttattaattgagcttggttattgttctgatcaccgttgtatcctgcatcccatatctctgcatgcttgccaaatttggccaacttctggaccaaagtggatgggttgacaatgcctgtgacaattgccgtttgctcttctgcattaatgtctactttacagacacctggagataaacaatggaaattggttaacttacatcttc

SEQ ID NO: 752 - DNA, 1497 bp, Glycine max
atggccaagcactttcttctgcttctttttgcagtatatgttgccgctattgatgaagaaccttttataggggtgaatattggtagagatctctcagacatgcctcaccccactcaagtagtagcactacttaaagcccagcaaattcgacatgttaggctgtatgatgccgaccaagctatgctcattgctcttgcaaacacaagaattcaagttgctgtgtctgtccctaatcaagagatccttgcaattggtcaatcaaataccacagctgcgaaatgggtttcccataatgtgatagcacattaccctgccactaacataactactatttgtgttggttctgatgtcttaactaccctcccctatgcagcaaaagtgcttgtcagtgcccttaagttcattcactcagccctcgtggcatccaatcttgatcaccaaatcaaagtctcaacacccctttcctcttccatgatccttgattcatttccaccttcacaagccttcttcaaccgctcactgaatccagtcttggttccaatgcttgatttcttgcaaaccactggctcttatctcatgctcaacatctacccttactatgactacatgcagtcgaatggtgtgattccattggactatgcactcttcaaacccctccctccaaacaaagaagccattgattccaattcccttctccactactccaatgtgtttgatgctgcggttgatgctgcatacgttgccatggcttttctaaattacactaacattcgtgtggtggtgacagaaacaggctggccctcaaaaggtgactctaatgagcctgatgcaacagtggaaaatgcaaacacttacaacagcaatttgatcaagcatgtgcttaacataaccgggactccgaaacaccccggaattggtgttagtacttacatctatgagctctacaatgaggatgcaaaggcagggccattgtcagagaagaactggggtttgtttgatgcaaatggtaaacctgtttatgttttgcacttgacagaatcaggaggagtgttggcaaatgacaccaccaatcaaacttactgtgttgcaaaggatggtgctgatcctaagatgctgcaggctggaatagattgggcatgtggacctggcaaggtggattgctctcctttgctgcaaggacaaccatgttatgaaccagacaatgtggtggcacatgcaaattatgcttttgacacttactatcatcagatgggaaagtctcctcagtcttgtgatttcaatggcatggctacaatctccaccaccaatccaagtcatggatcctgtgtatttccaggaagtcttggcaacaatggcaccttccccaacgtcacgttatcatcaatgaattccacaaattcagattcttctgcctgcaatctccatagtggtgaattgggaattagaagccttctaatggtgatagtacttctactatggggagtggctttgctataa

SEQ ID NO: 753 - DNA, 1959 bp, Glycine max
ttataaaaatgaaaagaagctagtaaagtgtgtgtttgcctcattcttcagtccttgtcttggttttctgctacctttgcctgtgaaaatccaagacatagcagatagatgattccttagtcatttgatttctctaacaacctttctacctatgacactatcttgatcttgctccctctttcttactgcatttaccccaccttgttctttccatttttctgacttgctcctttttctctcatacagttcattcttgagtttttcttacctagtttgttagggagatttacacaatggccaagcactttcttctgcttctttttgcagtatatgttgccgctattgatgaagaaccttttataggggtgaatattggtagagatctctcagacatgcctcaccccactcaagtagtagcactacttaaagcccagcaaattcgacatgttaggctgtatgatgccgaccaagctatgctcattgctcttgcaaacacaagaattcaagttgctgtgtctgtccctaatcaagagatccttgcaattggtcaatcaaataccacagctgcgaaatgggtttcccataatgtgatagcacattaccctgccactaacataactactatttgtgttggttctgatgtcttaactaccctcccctatgcagcaaaagtgcttgtcagtgcccttaagttcattcactcagccctcgtggcatccaatcttgatcaccaaatcaaagtctcaacacccctttcctcttccatgatccttgattcatttccaccttcacaagccttcttcaaccgctcactgaatccagtcttggttccaatgcttgatttcttgcaaaccactggctcttatctcatgctcaacatctacccttactatgactacatgcagtcgaatggtgtgattccattggactatgcactcttcaaacccctccctccaaacaaagaagccattgattccaattcccttctccactactccaatgtgtttgatgctgcggttgatgctgcatacgttgccatggcttttctaaattacactaacattcgtgtggtggtgacagaaacaggctggccctcaaaaggtgactctaatgagcctgatgcaacagtggaaaatgcaaacacttacaacagcaatttgatcaagcatgtgcttaacataaccgggactccgaaacaccccggaattggtgttagtacttacatctatgagctctacaatgaggatgcaaaggcagggccattgtcagagaagaactggggtttgtttgatgcaaatggtaaacctgtttatgttttgcacttgacagaatcaggaggagtgttggcaaatgacaccaccaatcaaacttactgtgttgcaaaggatggtgctgatcctaagatgctgcaggctggaatagattgggcatgtggacctggcaaggtggattgctctcctttgctgcaaggacaaccatgttatgaaccagacaatgtggtggcacatgcaaattatgcttttgacacttactatcatcagatgggaaagtctcctcagtcttgtgatttcaatggcatggctacaatctccaccaccaatccaagtcatggatcctgtgtatttccaggaagtcttggcaacaatggcaccttccccaacgtcacgttatcatcaatgaattccacaaattcagattcttctgcctgcaatctccatagtggtgaattgggaattagaagccttctaatggtgatagtacttctactatggggagtggctttgctataaaattatgtacgtcagaatgtgcattgttcattttaaaaattagtggtagatgagatgacaatgttatatgctagttcggttgcatgttcatattcacccatgcaattttgtacgtgaggaggggtagcaagtagcaacacttttttcaagtaaaaacattccttttggc

SEQ ID NO: 754 - DNA, 1035 bp, Glycine max
cagaaataaaattttcagacatttaccaacctccaaacttcatcttttcccactctttatatagtcccttcatcagctcagttactgctacacacacactccacttagttaaacatggagaaagcaggctctaacagtcctaaatctgctttgaagtttgtgaagaacacttctcagtctgcagctcaatggagcagtactaattctagaggaatgacaaaagatgtactcaaagacaagttctatgacaagactaaagcttcacgaaggtctccacccaaagaaagtaacatggcttcaagaaggtctccacccaaagaaagtaacatggcttcaccaaggtctccacccagagaaaatactaagccacaagaatttaaactccacacccaagaaagagctgtcaagcgtgcaatgttcaattatgctgtgacgacaaaattctatatcatggagctgcaaaagaaacaagaggaaaagctgcaaaagttgattgaagaggaagaggttcgtttgctgaggaaggaaatggttccaagagctcaattgatgccttattttgataagccattcttcccacaaagatcaagcaggagtattccaagagagtcatgcctccacatgatgagcagcaagtgttggagctgctcggttggcaatgaaatctacaacttgcaccactatggtcatcaaactctcaagcccattaagtagaaagctttgagggaaggagcatgtaaaatgtacactatccatgtattcattcatccttgtatttcaagcatgttgtacactatccatagggaaacttagagttttgtactataccatgggacaacctagctccttgattaggcgggcggggagatgttttgatgatgttttctttgtcacaaataaagatcaaccgtgtatttttggtgtgtcttttgatcttgggtgtttccacaccaatgccttgtaccattttttccataccaatgccttgtaccatttggaaatcaatagaatagaattatcactttgcatgtgaaa

SEQ ID NO: 755 - DNA, 1848 bp, Glycine max
atggacaaccttcaaaaatgccaagcaaactacacagcactcacacctttaacgtttttgatgagggctgctgcatgctatgcaaacagaacctcagtgatacatgaaggaacccgtttcacttgggcacagacttatgagcgttgtcgccgcctcgccttctccctccgtgcccttaacattgctaggaatgatgttgtatcagtgctggcccctaacatcccagcaatgtatgagatgcatttcgcagtgcctatggcaggtgctgtgctgaacaccatcaacacccgtcttgatgccaagaacattgccaccattctgcgccactccgaagccaaagtcttctttgtggactacgagtacgtgtccaaggccaaagaagccctcagattgctcatggacgacaacaacaacaacaacctcaaaaagggtgttccaaaaccaacaaatcaaccacactcaacgacattttctcttccactagtcattgtcatagatgacataaacacccccactagaatccgtcttggtgagctagaatacgagcaaatggttcatcatggtaacccaaattacttccctgaaggaatccaagacgagtggaccccaattgcgctgaattacacatcaggaacaacctcggagccaaagggtgttgtttatagccacagaggagcatatcttagcaccctaagcctaatcttggggtgggaaatgggtagtgaacctgtttatctctggacactacctatgttccattgcaatgggtggaccttcacgtggggcgtggctgcacgtggtggaacaaacgtgtgccttcgcaccacagctgcacgtgacatatacaggaacatagtagtccacaatgtgacacacatgtgctgtgcccccattgtgttcaacataatcttggaggcaaaacaaagtgaaaggattgacataaaggtaataaatgggaagagaaaatcaccggttgagattctcactgggggagcaccaccaccagcatcattgctagagcaaattgagtcacttgggtttcatgtcacacatgcatatgggctaactgaggcaacaggcccagcacttgtgtgtgagtggaagaaggagtggaacatgttgccaaagaaggagcaggcccaacttaaggcccgtcaaggggtgagtgtgttgactatggctgatgttgatgtgaagaaccttgagacaatggagagtgtggctagggatgggaggacaatgggggagattgtgctgaagggaagtgggatcatgatggggtatttcaaagatcataaggcatcttcaaaggcttttgggaagaatggcgattggttcaaaactggggatgttggtgtgatacaccctgatgggtatttggagattaaggataggtctaaagatgtgatcatttcaggaggggagaatattagtagtgtggaagttgagtcacttttgtataagcaccctagggtgttggaggctgctgtggtggcaatgccacaccctaggtggggtgaaactccttgtgcttttgtgtccttgaggaagaacaacaacaactcatcatcatccaaaattgatgatgtcactgaggctgagataattgcctattgcaggaagaatttgccacactttatggtgcctaaggtggtgaagttcatggaggagctgccaaagacttcaactgggaagattcagaagtttgagttgagggtcatggctaaggttttcgtgcagaccaagaataatactaccactgtcaacaagaagtcttgccaagtgagtcaaaatagtattgttggggggtacaataatgagcaagttttggctgcgtctcgtctttga

SEQ ID NO: 756 - DNA, 456 bp, Glycine max
atggcgccagcgctgaacctcgccgccggaggaattccgctgagtttctcttcctccgtcgaccgctccgccagctttccacggcggtcctcggtccgcgccgtcgcggctgaggcggtggatacgcagcggccggcggcgagcctttacgaggtgctgcgagtcgagcgagacgcatcgccgacggagatcaagtcggcgtaccggagcctcgcgaagctctaccatcccgatgcggcggtgcagaggtcaccggagactgacggcgacggagacttcattcagctccgaaacgcgtacgagacgctgtcggatccgtcggcgagggcgatgtacgataggacgctggcggcggcgcacggcggaagacaccgccggttttctacttcgcttagtcggaaccactcgtcggcgttttacacgacgcgaaggtgggaaacggaccaatgctggtag

SEQ ID NO: 757 - DNA, 1448 bp, Glycine max
ttaaaacaaaattattaaaaatattattacataaaaatttacttattacattaatattttttttactctccactcattgatctagatacattaagattgaacaataaacaattgatgatattttatcataaaaatattaaaaaacttacaacaaagtatatgtggacccgtattgttgtaacatccacaaatttgggcttctagaagccattttaaaacgcaccgcatcagccacgtcagcatttgtcattttttttcacactttcttactttaacagaccccatacagttacgcacccataccttgtggcgtgtgaaatgacgcttgtaccgctaaatctctctctttctttgacctctatataaaccccctcacaccactttcctcagcacccaaacacggttctaacatatctcattccaatttcgcccctcgccggaaaaagaaaacctcaccgcaacgttcgattcagtttccgatggcgccagcgctgaacctcgccgccggaggaattccgctgagtttctcttcctccgtcgaccgctccgccagctttccacggcggtcctcggtccgcgccgtcgcggctgaggcggtggatacgcagcggccggcggcgagcctttacgaggtgctgcgagtcgagcgagacgcatcgccgacggagatcaagtcggcgtaccggagcctcgcgaagctctaccatcccgatgcggcggtgcagaggtcaccggagactgacggcgacggagacttcattcagctccgaaacgcgtacgagacgctgtcggatccgtcggcgagggcgatgtacgataggacgctggcggcggcgcacggcggaagacaccgccggttttctacttcgcttagtcggaaccactcgtcggcgttttacacgacgcgaaggtgggaaacggaccaatgctggtagaggaattagcaaagaaaaatgtggatttgttaacaagaaagaggaatcgccgaatcggtgaaaacgatgtcaaaaagagtgatgagaatcggaaattactaacttagatggatagagcaaacaaagagagagagagagagaggatgaagaagcaaattttgcttctctttttgtgagaatgtaaatgattttttttttttttggtgtggctatttgtttgatttttctttttttcggcaatttcacgaaagacaataaataagatgggaataataataacgaataatgagctaataagttaaaaagagatttcaatcgtgaaagtgactatgcaaaaacagtatagatgccaacattttcacgtcaggaaaatgcacttacaatgtgactcacgaatcacagacgtttgtgtttggattgcagttaagaaaaaaacttgtcaaacagacaaacacgcattctaatgtaccaatatttgtctccttgagatgaaacgttaaacctaatttgtat

SEQ ID NO: 758 - DNA, 1491 bp, Glycine max
atggatcttcaacttctctacttcacatccatattctccattttcattttcatgttcatgacacacaaaatagtaaccaaaaaatctaactccactccaagtttaccaccaggaccatggaagctacctatcatagggaacatgcacaaccttgttggctctccacttccccatcatagactaagagatttatcagcaaaatatggatccttgatgcatctgaagcttggagaggtttcaacaattgtggtttcatcaccagaatatgccaaggaggtgatgaaaacacatgatcatatctttgcatcaaggccttatgtccttgctgcggagataatggactatgatttcaaaggtgtagctttcacaccttatggtgattactggagacagctaaggaagatctttgcattggagctattaagttccaaacgtgtccaatctttccaaccaatcagagaggaagtgctcacaagtttcatcaaaaggatgactacaatagaaggatcacaggttaacattaccaaagaagtgatttcaactgtctttacaataactgcaaggacagcccttggcagcaagagcaggcaccatcagaagctaatatcggtggtaaccgaagccgcaaagatttctggaggttttgacttgggagatttgtacccttctgtgaaatttcttcagcacatgtctggcttgaagcctaagcttgagaagttgcatcaacaagctgaccagataatgcaaaacatcatcaatgagcatagagaggctaagtcaagtgccacaggagaccagggagaggaggaagttcttttagatgtgctcttgaagaaggagtttggcttaagtgatgaaagtatcaaggctgtgatctgggatatctttggaggtggaagtgatacatcatctgctaccataacatgggcaatggcagagatgattaaaaatccaagaacaatggaaaaggtacaaactgaggtaagaagggtatttgataaagaaggaaggcctaatggaagtggcacagagaatctaaaatatttgaaatctgttgtgagtgagacattaagattacaccctccagctcctcttttgcttccaagagaatgtggacaagcctgtgagataaacgggtatcatatacctgcgaaaagcagggtcatagtgaatgcttgggcaattggaagagatccaaggctgtggactgaggctgagaggttttatcctgaaaggttcattgaaagatctattgaatacaaaagcaatagttttgagttcatcccatttggtgctggaaggagaatgtgcccaggcctcacatttggcttgagcaatgttgagtatgtgcttgcaatgttgatgtatcattttgattggaaacttcccaaaggaacgaaaaatgaagatttgggcatgactgagatatttggaataacagtggctcggaaagatgatttatatctcattcccaaaactgttcataattag

SEQ ID NO: 759 - DNA, 827 bp, Glycine max
tgcatcctataaatttaaatgcaaacgtcagcttctcaatgttctatgccttacaatagcattggcatccctctagcatcgttgtctaacagaaaatggcttcaactgtagtaccatatatgagtttctatgcccacacttcatctggcagaatgaacaaattttccaatgtcaaattgctaccagtgtcaagcacaaggaatagaactttcagctacagtgtaaaggctatggcaggaggtgaagcgagtttgcagaagtcaaatcagcaccagcagcaagtgcagccaaagatgaaggtgccacaaggttcacctaaagtgctgctgaaccagtttcctgtagcaaggactgtgcagcaaatgatggatacaatggagaggatgggggaggatctcttggtttatggtagaacttcacctgtgatagttgcgggagatgatgaatacagtaaggggaagattccttgggcaataaaggaaggccaaaaagattacaaaatgagattcaacatgccaggaatgaacaagaatgatgtcaaggtatgggtagaagagaacatgctggtggtgaaggcagagaaggcactcgaagagaatcatgaaggtcgagcaaatggcaatgaagactggcctgccaatagctatggtagatataaccacaggatagccctcccagaaaatattgagtttgataaaattaaggcacaggtcaaagatgggattctttatgtaacaattcctaaatccagcacctctgcaaaaataattggcatagatgtacagtaactataagctcataataaagtttgttcacggctacattta

SEQ ID NO: 760 - DNA, 1077 bp, Glycine max
attgtatgcttctgtttctttcaacagtcattttccagttgtttcttcaataagcatcagcactctgccacatccagttcccttctgcgtgttcctttcttctactctctccagtccggccaaagcgaagctccttccatcattttcagtttttactgtcaagtgctgttgcttctgctcccaaacttatccaaatattgcttgtaacaagtcgcccatgaacttgttgagcagaatcgttgggttgggtagcccaagggctgcacaaaacatgaattcaaccactgctcagggaccagatgatgagataccagcaccaggtcaacagtttgcccagtttggtgctggctgcttttggagtgttgagctggccttccagagggcagcaggggtgaccaagacagaagttggttatagccaggggcagttgcctaatccaagctatgaggatgtgtgtatgggaaccacacaccactcggaggttgtccgggtcgaatatgatcccaatgaatgtagctatgagagtttgcttgatgtgttctgggctagacatgatcctaccacactgaatcggcagggtaatgatgtaggaacacaatacaggtctggaatatactattacacacctgaacaggagaaggcagccatagagtctctggaacaacaacagaagaagctgaacaggaagattgttactgagatccttcctgccaagaagttctacagggcagaagaataccatcaacagtaccttgagaaaggagggagatttggttccaagcaatctgcttctaagggatgcaatgatccaattcgatgctatggttagattaatatgtctagatgttgaaagcagggagttttcttgataagtatttgttaatatatcaataaagtaattcaaaacctgcctactctctgtattgtatttatagggtgaagatcactatagaattagaatcagttttaatgttatgtagtattttatatgtatagttctctaataagctgattttataataactttgattagtggcacttcttgagttaaaatatcgttattttgttgggtttttc

SEQ ID NO: 761 - DNA, 1350 bp, Glycine max
ctttttctttcccctttctcttttatgtgagaaaagcttatcatctgggtcagtttcaagttttcaaatttgaaatgtgaggagctgtgttaaggactgcactctaatgcttctgagttctgagtaagattttctggcaatatccttctcaaaagctttgaacacttgggtttttgattggagctaagaggagcatggaagataccaagggtgacaaaggagctgtcacagtaggaaccactggaacaatcagcttgttgatgacaagggaattggatcagatgtcttctgttccacaccaggaagtatcttcaacaagtaaacctcgaatttcagtttcgagtggtagtgctacgccaaaacgaccacaaccaagaaaatcatttgaagccagcagtagtagcagcagcagaagtagtagcatcttaaaccatataagtcctgggattggccccaaaacaaaacttaatggcaaacatacccatcaaatacccattcttggttaccagaaccttccactggagacaagtccagttacgaagaaaaaggataagaagaaaaaatctaaaattgttgaagtagtggacatcaaatgtggctatgtagataaaacttgggctacccctataacaaattctctcaagaagttgggtttctctaagctctctgagagcattacctaagggtgatgttttatgtcagacttcaggttcttgtagctgaaagcagaggtcccctttggcttactgttgtcagatacatcgaccacagaacacatctttgtttgagacttgttcttctgtgaccagtcttgggaattgaattcctgccggctatagtactcaatttcttgcattagaagggatccaactgtgcctctggtgcctatttccacaggtggaaatccagccatctcttttgtgttgcttgtggcaaggatggtgggtttatgcatgctttattttgttggtgtcaaggagaaagcaaaatcttatgatttgagaggggcggtgtgttgtattattttggtgatgaacttttccacaaactgtggcatttttcttaggtttgaagagacttagtttcacaagaactctccaccttatactatttatatgaagtgcatggcatctattatgtgtatagttttgtagagttagttagtgacacgtcattccactcatgtgctagcagtaaaacacttgagctcctaactactgtactatccttgtaacgttaagtttcagcaacatgtctcggtacttgctaatgaggtaaattatttgagactatggtcaatgtaatttggaccagatggaattcatgtgaaagaaagagattggactttca

SEQ ID NO: 762 - DNA, 2428 bp, Glycine max
ataaactataaatacatgatggaataactttgtgttcacaattcatttctccctctttagatttctcctcttctccaattttaaacgaaacttccatatttttcttaaatttatttgatcgttttgctcgtggctgaggagctcctttatgcagaaatggccaacacctacaagccaaagaacattctcataacaggagcagcaggcttcattgcatcccatgtatgcaacaggatagtgcgaaactaccctgactacaaaatcatagtccttgacaagctcgattactgctcaaatctgaagaatctcattccctcgcgttcatctccgaatttcaagttcatcaagggagacattggaagtgctgatttagtaaactacatcctcctcacagagtccattgacaccatcatgcactttgcagcacaaacccatgtagacaattcctttggcaacagttttgagttcaccaagaacaacatctatggcacacatgtgctcctagaggcttgcaaggtctcaaagggtcaagtgaagaggttcattcatgtgagcactgatgaggtttatggtgagacagatgaggatgctgtggttggaaaccatgaggcttctcaattgttacctaccaatccatattctgccacaaaagctggtgctgaaatgcttgtcatggcgtatggtagatcgtatggtttgccggttataacgacgagagggaacaatgtttatgggcctaatcagtttcctgagaagttgattccaaagttcttgctcttggccatgaaaggaaggactcttccaattcatggggatgggtctaatgtgaggagctatctctattgtgaagatgttgctgaggcttttgagatcattctccataggggtgaggtagggcatgtttataatatagggacaaagaaagagaggagggtgattgatgtggctagggatatatgtaggtttttcaatttggaccctgacacacatgtcaagtttgtggagaataggcctttcaatgaccaaaggtacttcttggatgatgagaagctcaaggatttggggtggtctgagggcactacttgggaagagggtctaaggaaaaccatggattggtatgtcaagaatcctgattggtggggtgacgtttctggtgctttgcttcctcatccaagaatgctcactatgccaggagttgagaagtactatgatggctctgataatgtgaccggaaccgcttccaatggtgatgttaaccattctaatcagaacagaatggtggttgttccagccacaaggaataatgtgtcaccacaaaaggcatctttgaagttcttgatatatggtggtgcagggtggattggggggcttataggaaacatttgtgagaagcaagggataccctttgaatatggcatggctcgcttagatgatagatcacagatcttgtttgattttaggaccattaagcctactcatgttttcaatgcttctggggtgattggagcattaaatgtgaaatggtttgaagctcataagccagaaactatacgtgctgttgttgttggtgtgttaacattagcagatgtctgcagagatcatggtctcctcatgatgaattatgcctttggtggtaacttggaagacaaagcatattccactgatgccttctattttagaacacaagccaaggttgaagagttgctaaaggaatatgaaaatgtttgcaccctaagaatccaattgccagtgtcatctgatctcagcaacccacataacttgatcactatgataacaaggtctgataaagtggccaacattccaaacagcatcactgttttggatgaactcgtaccaatttcaattgagatggccaaaaggaattgcaggggcatttggaacttcacaaaccctggtactgtgacatgcaatgagattcttgagatgtacaaggattatgttgaccctacttttaaatgggttaattttacacttgaacaacaggctcatgtcccttctccaagcactaatgagatggattcatcaaaactgaagaaggaatttcctgagctgttgcctgtcaaggactcattgatcaaatatgtgtttgagccagaaaagaaaagcttggggttttgagtagcataattaaccatatataaatgtatacatttcggtctctatcattttattttcccttttttggttagtttggtttagtttgatagaattgaatttcatattccttttacctttttttttttcatttgtatttgcttctgctttttgtagatgcttgggttttgtagtttatattttctattccataacagaactattttggtcaaaatcaaaagaagttgaataaagggttaacccctgatgtatgaaactatgaatatatccaaattcgtccatggattttttt

SEQ ID NO: 763 - DNA, 1369 bp, Glycine max
ttacattgttgtctgctgagaaaaacagaagagtgaaatggagcttgcacctgtgaagtctgaactaagtccaaggagccataggttggtcattatagatggtagtgatgttattagcactaagtgtgccaaaaggcggcgaagagattcgtctatggccgtgttaggtggcaatggacaacaaggtgaacagttagaagaacagaagcaacttggtggccaatcaactgccaccactgtgaagagaagctcaaggttcaggggagttagcagacacaggtggactggaaggtttgaagcacatctatgggataaagggacctggaatcccactcagaagaagaaaggaaagcaagtatatttgggagcttataatgatgaagaagctgctgctagagcttatgatttggctgcactcaagtactggggaacatcaactttcacaaatttccctgtatctgattatgagaaagaaattgagataatgaaaactgtaaccaaagaagaataccttgcttcattgaggaggaggagcagcggtttttctagaggtgtatcaaagtatagaggagtagcaaggcatcatcacaatggaagatgggaagcaaggattgggagagtgttcggcaacaagtacctctaccttgggacttacagtacacaagaagaagcagcccgtgcatatgacattgcagcaattgaatacagaggcataaatgcagtgacaaattttgacttgagcacctacatcagatggctaagaccaggaacacatcctactgcttctcatgatcaaaagcctagcactgatgctcaactttttgcaacctctaactccatgcaaacaagagggaacattgaggtatccaactccaacatgcattcattcccctcaggtgaattggacagtaccaagaagcgagacttttccaagtacatgaaccctttgagtccttgcaacaagccatcttccccaacagcattaggacttctcctaaaatcctcggtgtttagagaactgatgcagagaaatctgaactcttctagtgaagaagctgatgttgaattgaaatatccacaagagggcaatgatggggttggagggatttatgataatgacaacaccagtaactcttacttttgctcttctaatatcagcagattacctaacttggagtcatcagaagagtgtccattgcctatgtatcatggaactatgcaatcactatggaatagtgctttcaacatgtctaactgattgcttttgttattttattttatttttctgttaggaaaacttgagagaaactatctccctccttagcatactagtggatgtcaaataattgccaagatgtgcataacgtca

SEQ ID NO: 764 - DNA, 751 bp, Glycine max
gaatttcacttgttcttgtagtagaacaaccatttaagctcgcttcttattgttctcttttcttgcgtgaagcttgcgtaccttccgagttgtactaggttgccgagctcgtaaccctctccgcaatgaccaacaaagaatacggagacaacaacaagatatcagtttgtgagacgtcaatgttgttggtggcaaacatcatcagattatcgtctctaagattttccggccatagtttcagaaaagaccttgatcctccacaagaggaagcaacctatgtgggcaaaggcaacgaatcttcggtatcaaaattttacaagagtgacagaacacaggagccggagaggatcaaaaggcctcgttcctacctcatgaaaccaccaaaggaggatccaacaaactatgtgagtcaggcactagacgacgttgacatcaacgctgagaactatatcagccatattcgtggaaagattagggacagtggtaatattgaatattgatacaaagcaaaatgcttttcaccatatcttccacctcgaactgtcagcttagtggtggggttagatagatgcatgagggcatagctttgattgatcgttgccaccattatacagaagaaaataaaaagcttctgcctctagtatagtcaagtaggttttgcactttttgtgaattattgtgtaaagctataataattagctaggttgccaatgtttcattttctgttcaaattatcaataaagatttagtt

SEQ ID NO: 765 - DNA, 3087 bp, Glycine max
atggacaaggtttatgaagagctcgatgaagcaaaagcaaaaattgaggaactcaaggaagaactaagagccaagacagattcacttgagaactggaaaaaatcccacaatgcacagatcaatcagatacaggaagcaaagttcaaagctgagaagctggatcaaacactgcttcaacaagcagatgaaatctccgaggcaaagctggtttgtgaagatctcaaagggaagttgactaaaaaggagtccatcatcaaacatctcagggctgcaaatgataaacttcgagtggattgtgatgccaagttcaaaaagtgggaagaagaaaaaagagagttggtgttagccttagaggagggaaatgagaagacacaggaccatgaacaacagattcatcaatacaaacaagaaattgaaagactgaaaggttgtctttcagtttcaaaggagaagtgtgtggagacagaaaaaaaatttaaagcatccaaagaactaagagaaagagatgacatgttccagaagttagaggaggaatgcaggaaggcggaagatcaattaaaatggaagaaggaacagtttaagcatctagaagaagcacatgaaaaactccgagaccagtttaaggctagcaagaaggaggcagaggtggaaaaatctacattgcttgatgggatttcttcacttcagactaggttagactctcagatcagagtatcagaggatttacaacatcaattacacacttgccaccaagctcttgctcatgtggaaagccaaaaaaagtgtctggaagttgaagtttcaaatcttaaagtgcagcttgataatgctagcaatgagtaccaggatgctaggttacagctagattgcttaaacactcactgcgacaaagatattgcagatttgagatatttgctaaagacaaaagaggcatataataaagaatcaaagtacaggattgagaagctagagcaagaaaatcaagagctgcggatgtccctcaaagaactccaggaagctcaaattcaagaagcaggaacttcatattcgcagtcaaagttgcggtccaagctcagaaatttggaacaaactcataaagagtgtgcctctactttaaagactaaagaagctgaatggaactttaagataaaacagttgacagaaaacctgaatagatgtcagtctgatttggaaactaaaattgaagcagtggaagacctccagatggagttagaaaggtctcattctttagccattgagatgatgttattgaatgaggagatttctgtgatgcttcttgtgttgaaacagggaacttctgaggctcaattgaagcttgctggccataaagatgaaatggatcttatcagcaaagctagtgaagagaagatttttcaactaatgaggcagttggagatgaaggatgctgctttgatcagtgcccagaaaagcataaatgaagaacgtgagatagcagcacgtttgatgaagcaggttgagtcttctgtatccaacaatgaactgcattcactgcaaaatgaacttgatagacacaaggaaatgctggaggaatcaataagaagtcagctgatcctcaaagagaacgttttgcagatggaatgtaactttaaagaacagttggagatgaaagatgttgttgtgatcagtgcacagaaaagcataaatgaagaacgtgaggtagaagcatgtttgaggaggcaggttgagtcttatgcatccaacaatgatgaactgcagcagtcactgcaaaatgaagtcgataggcacaaggaaatgcaagaggaatcaacgagtcagccgatcctcaaagagaaggttttgcagttggaatgtaactttaaagaacagcttaaagaaattcatgatgctttcgacagtgtaatcattgaattggatgaaacaatatgtgaaagaaatgaaatggaatttgaattgcaaatatggaagtcaattgttgagcacttgaagaatgatcttgaagaaaatcatgtggtgcgtagagaactggaatcttcacttcttgcacaagtagattttggtgaaagcctcaagcatgagaaagatagcttggtttataagttggaagagaaagagaggagcctagattatctgcagcgacatgttgtgctattggaacgtgagctaatagaaaggggagaatcagcggtgtcctctgagtcagataatgtcagatatctccagatcatagcggagaaggacaagattctagaagagcttcagaaagaggttgtatggctggaacaagaatcatttagaaaagaatttgaaagtgctgtgattgagaaaggcacaatggaaagaacctttgagcatgagaaagataatcttatccagattgtgaaaggaaaagacaggagaatagatgaactcatgcagcaggtgacttcactggagcaacagttcactaactcattgaccaccttttcttcacagcttgctgagaaacaggctgaaattaacctcatccaggaagcttgttacaagatcacaacatctcagattctagctgcacttgaaattgaagagaagaagtttatggtagtggaacttgaggatgatattcatgctatacagcagaaactgaaattgcaggaggaaaagtggagcccatcagagcaacttgcattggatactgaagtagaattgggtgcaaaacagttaaaggcaatggagttgaatgatcaaatggagtctaagctaagaaaatcagatgctttgcttcataaactcaagatggagaatagaaatttacttgaaagtgccacgagactgtcatcggaaagggaaagcttgttggcaaatgttcagggattcagtgataaaatctgcgagttctctactgcagacactatactaatggacaagttgagaagcatggtgcagtcttttgagaatggttgtcccgtaatgaagttgaaaaaggatgatggtttccttgtaaaagagaataatatgttgattcagtctcccacgaggataaagaaacttgaagccaattctgatactagatcaccattcaaggagctaaatttgctagaagaatag

SEQ ID NO: 766 - DNA, 1594 bp, Glycine max
atgcaagaatcatttgatcaacaaggaggttggatttgttttaatcagttgatcatgcttggccatagatctaggtgctctgccttcattttacatttggacaagatggcaacaacaacagtttccaacttgccaattgctatgtcaagacccaagattccttcatcacaaaggattgcaaatgtatgtcctgcaattcttggaggtagatctaaggttggttcatgttataaactggcaagtgtttgtcatgttgcatcagcacaacctttccatcagggcttggcaatgacatcaggtgctgcaaaatatggcaaaatcctaacaaaggcaatgtccgagtctagttcaaacaaggaagttgcaggattgccaattgatttgaaaggtaaaagggctttcattgctggtgtggctgatgacaatggatatggctgggcaatagcaaaatctctcgcagcagcaggagctgaaattcttgtcggcacatgggtacctgctttaaatatatttgagtccagtttacgacgtggaaaatttgacgagtcacgcaaattacaagatggttcgttaatggagattgctaaagtgtatcctttggatgcagtatatgacaatcctgaagatgtcccggaagatgtgaaagctaacaaacgctatgctggagccacaaattggactgtacaggaagttgctgaatctgtcaagaaagattttggcactatcgacatacttgtgcactcgcttgctaatggaccagaggtcagcaaaccattgtctgagacatctcggaaaggatatcttgctgccctgtctgcatcaagttactcttatatttctttactcaaacactttcttccaatcataaacccagatggatctgcaatttctcttacatacattgcttcagaaaggatcattcctggatatggtggtggtatgagttctgcaaaagctgctttagaaagtgatacaagagtgcttgcttttgaagctggtagaaagaaaagaatcagagtcaatactatatctgcaggtccattgggaagccgtgcagcgaaagcgattggtttcattgacatgatgattgactattcatttaccaatgcaccactgcagaaagaactacatgctgaggaggtaggcaacactgctgctttcttgtcatcacccttggcatcagctattacaggcgctgtcatatatgttgacaatggtctaaacgctatgggtgttggagttgacagtccaatatttaaagaacttgacattccaaaagagcatcattgaagtgcttagtatatcatctctaccccaactaaagatttatacggcctaggatgatgaaaaaaagctatgaggaatttagtttttgcaatttcgtaaattagtaaacggttgtttgaactttgctaccattgatttttatcaattaccatccactttttcactaccctctacaaaatgtatcttaactatttgaagagttattttatttaggctttggttgttttcgcggacggaaataatataccatagacggaattgaggttggttgtttggtaagaaccatttaaaagggagttaagtttgc

SEQ ID NO: 767 - DNA, 1594 bp, Glycine max
ttttttatcaagttgtccttatttggtatctggagtttatttgttatcccaagtttgctaagtacaagatctaggtgctctgccttcattttacatttggacaagatggcaacaacaacagtttccaacttgccaattgctatgtcaagacccaagattccttcatcacaaaggattgcaaatgtatgtcctgcaattcttggaggtagatctaaggttggttcatgttataaactggcaagtgtttgtcatgttgcatcagcacaacctttccatcagggcttggcaatgacatcaggtgctgcaaaatatggcaaaatcctaacaaaggcaatgtccgagtctagttcaaacaaggaagttgcaggattgccaattgatttgaaaggtaaaagggctttcattgctggtgtggctgatgacaatggatatggctgggcaatagcaaaatctctcgcagcagcaggagctgaaattcttgtcggcacatgggtacctgctttaaatatatttgagtccagtttacgacgtggaaaatttgacgagtcacgcaaattacaagatggttcgttaatggagattgctaaagtgtatcctttggatgcagtatatgacaatcctgaagatgtcccggaagatgtgaaagctaacaaacgctatgctggagccacaaattggactgtacaggaagttgctgaatctgtcaagaaagattttggcactatcgacatacttgtgcactcgcttgctaatggaccagaggtcagcaaaccattgtctgagacatctcggaaaggatatcttgctgccctgtctgcatcaagttactcttatatttctttactcaaacactttcttccaatcataaacccagatggatctgcaatttctcttacatacattgcttcagaaaggatcattcctggatatggtggtggtatgagttctgcaaaagctgctttagaaagtgatacaagagtgcttgcttttgaagctggtagaaagaaaagaatcagagtcaatactatatctgcaggtccattgggaagccgtgcagcgaaagcgattggtttcattgacatgatgattgactattcatttaccaatgcaccactgcagaaagaactacatgctgaggaggtaggcaacactgctgctttcttgtcatcacccttggcatcagctattacaggcgctgtcatatatgttgacaatggtctaaacgctatgggtgttggagttgacagtccaatatttaaagaacttgacattccaaaagagcatcattgaagtgcttagtatatcatctctaccccaactaaagatttatacggcctaggatgatgaaaaaaagctatgaggaatttagtttttgcaatttcgtaaattagtaaacggttgtttgaactttgctaccattgatttttatcaattaccatccactttttcactaccctctacaaaatgtatcttaactatttgaagagttattttatttaggctttggttgttttcgcggacggaaataatataccatagacggaattgaggttggttgtttggtaagaaccatttaaaagggagttaagtttgc

SEQ ID NO: 768 - DNA, 699 bp, Glycine max
gcattgtgaaatcaacagagaaacatttcactaatagagagacataagcataatattgagaaataatggagggttgtacttattgtgtgaagttgctatgccttgttgggtttgtggtgcttgtgagtactattgcaggggtggagagtgctggtgaatgtgggaaatctaccaccccagataatgaggcttataagcttgcaccatgtgcctcagcagcacaagatgagaatgctagtgtttctcagagttgctgtgctcaggtgaagaaaattgggcagaacccaagctgcctctgtgcagttctgctctccaacacagccaaaatggctggtgtcaaccctcaagttgctgtcaccatccccaagcgttgcaacctggctaatcgccctgttggttacaagtgtggaccttacactctgccttgaaagagttgaggttgttgctgaaaacaaagatgacagggcgtaagtgcactatggctgttggctactacaaactgtgactacatgtttgttgtatcgtcttgtaactttctagtgaataagagctagctgctcactagtgtaccctataataaaacatgtactttcggtgtttcatgtgcctactcaaacatttaactgttttaagttttaacaaaatcttttgatcatcgttacccaattaagtttgttataatatttaatattatctatt

SEQ ID NO: 769 - DNA, 2164 bp, Glycine max
aagttataagacaattaattaagttatttgacacaaaagtcagaagctagggtggtgaagactcaataaaatggactcttgggttagaatgctgtttctcattgcttgcattgttccagctttagtcgagtgcaaagtgaggcactacaaattcaatgtggtactgaagaatactactaggttatgttcaagcaaaccaattgtcaccgttaatgggaaatttccaggacccactctttacgctagggaagatgatacagtgctagtcaaagtcaataaccttgtcaaccacaatgtcaccatccactggcatggtgtgagacaacttagaactggttgggctgatgggcctgcatacatcacacagtgcccaattctgtcaggacaatcatatttgtacaacttcacccttacaggacaaagaggaacacttctttggcatgctcatgttaactggctaaggtcaactctccatggtgccatagttatcttgccaaagaggggtgtgccataccctttcccaaaaccagataaagagttggttgtaatattaggagaatggtggaaatctgatacagaagatgttatcaatgaagctctcaagtcaggattagcaccaaatgtctcagatgctcataccattaatggccttccagggattgtgtctgtggccaattgttctacacaagatgtgtacaagcttcctgtggaaagtggcaagacctacctattgagaatcatcaatgctgcactcaatgaggagctcttcttcaaaattgctggccatccattcactgtggttgaagttgatgcctcatatgtaaagcccttcaagacagacactctttcgatagcccctggtcaaaccaccaatgcccttttaactgctgaccaaaactctggcaaatacacaattgtagcctctactttcatggattctccagttgtagctgtggataacttgactgcaacagccacattgcactacactggcactcttgccaccactcctacacttctcaccacccctcctccaagaaatgccacccaagttgctaacaacttcaccaattctctcaaaagccttaattctaagaaatacccagcaaaagtcccacaaaaagttgatcattcacttctcctcactgttggtttggggattaacccttgtccatcttgcacagctggcaatgggagtagagtagtggctgctgtcaacaatgtgacatttgtgatgccaaccactgcactgcttcaggctcattacttcaacatcaagggggtgttcaccactgatttccctggcaacccttctcatgtttacaactacacggcgactccgccggcggcagcttggcagaccacaaatggcaccaaggcttacaggctggcattcaactccacagttcaggttgttttgcaggatactggggtcattgctcctgagagccacccggttcatcttcatgggttcaacttctttgttgttggctctggtgtaggaaattatgatcccaaaacggatcaaaataactttaatcttgcggatcctgttgagaggaacacaattggagtgcctactggagggtgggttgctttcagattcagagcagataacccaggtgcatacaacatgggggttgaagatggcattcttggtggacaatggtaaaggtcctaatgaatcactgctacccccaccaaaagatcttccaaaatgttagacttttcagtcatcgattgaacaacacacagacaagggaacaacacacagacaagggaaggatacagagaagctaggaaaaacaagagaataaaggggatggtggttatttaataagcaggatgtcccacttgcctttttgagctaatgggagcatttcttcacagtaggttggagtcagcattttggttttctttgaacatacacttttttcttgttaaagcgattcagatcatattcatatgtattgagatcgaccctgcataatttggttatttactgaaataaatctgtcacgttcttcatggttacatggttgatctttgggtgatttgagaactgtttgcatgaacaggatatgatcatgtatcaaaactcaattaaatggtaagcataactgcattaatttttgttagtctaatattaggatagcttgcttta

SEQ ID NO: 770 - DNA, 1362 bp, Glycine max
atggcaacttggatattatcagaatgtggcttgaagcctcttgctccagtaattcctagacctagaactggggctgctttgtccagcacctcaagggttgaatttttggacacaaacaaggtagtggcaggtcctaagtttcaacctttgaggtgcaacctcagggagaggaattgggggctgaaagtgagtgcccctttgagggttgcttccattgaagaggagcaaaagagtgttgatttaaccaatgggactaatggggttgagcatgagaagcttccagaatttgaccctggtgctccgccaccattcaacttggctgatattagagcagccattccaaagcattgctgggtgaaggacccttggaggtccatgagctatgtggtgagggatgtgattgctgtctttggtttggctgctgctgctgcgtatctcaataattggttggtttggcctctctattgggctgctcaaggcactatgttctgggctctgtttgttcttggtcatgattgtggtcatggaagcttttcaaacaactccaaattgaacagtgttgttggacatctgctgcattcttcaattctagtgccatatcatggatggagaatcagtcataggactcatcaccaacatcatggtcatgctgaaaatgatgaatcatggcatccgttgcctgaaaaattgttcagaagcttggacactgtaactcgtatgttaagattcacagcaccttttccacttcttgcatttcctgtgtacctttttagtaggagtcctgggaagactggttctcactttgaccccagcagtgacttgttcgttcccaatgaaagaaaagatgttattacttccacagcttgttgggctgctatgttgggattgcttgttggattggggtttgtaatgggtccaattcaacttcttaagctttatggtgttccctatgttatattcgttatgtggttggatttggtgacttatttgcaccatcatggccatgaagacaaattaccttggtaccgtggaaaggaatggagctacctcaggggtggtctaactactcttgatcgtgattatggatggatcaataacattcaccatgacattggcactcatgtcattcatcacctatttcctcaaattccacactatcacttagttgaggctactgaggctgctaagccagtgtttggaaaatattatagagaaccaaagaaatcagcagcacctcttccttttcaccttattggggaaataataaggagcttcaagactgaccattttgttagtgacacgggggatgttgtgtactatcaaaccgactctaagattaatggctcttccaaattagagtga

SEQ ID NO: 771 - DNA, 1761 bp, Glycine max
atggctcaactacagctaccaccactctcgagtcgcagttcttcaactgtgactcgaattaatttggtggtggctcaaagttgcatcggcaaatattttaagcttgtcgagcgcaacaccaccttcaccactgagctccgtgctggtaccgccacgtttctcacaatggcctacattcttgctgtcaacgccaccattattgctgactcgggtggcacatgcagcgtctccgattgcacccctctctgctctgacccgaaaacctcaccctcccattgcccgacccatcttttaacccgacccgactcctcatgcaagtacccgcctgtcaacccgggctacgcggcgtgcgtggaacgcacgcgccgtgacctcatcgtggccaccgtggcctcctccctcatgggctccgccgtaatgggcctcttagcgaacctccccttagccctagcgcccggcatgggcgccaacgcgtacttcgcctactccgtggtcgggttccacgggtcgggttccgtaccctacaaaaccgcattaaccgccatcttcttggaaggcctaatcttcctcgtaatctcagccgtcggattccgcgccaaattggccaaactcgttcccaaacccgtccgagtctcctccgccgccggaatcggtctcttcttagccttcattgggcttcaaagcaacgaaggcattggactcatcggattcagcccatcaacactagtcactctcggaggctgcccgaggaacaaactaacggcgttagctccggtcatcacaattaacggcaccgttagtttaatccccggcgccaccgtctccgacaagatactatgttccgggaaccgcatggagagcccaaccctatggcttggtttggtcgggtttttcattattgcttactgtttaatgaagaacataaagggggctatgatatacggcatcgttttcgtaaccgtgatctcgtggttcaggaacacgccggttacggtgttcccgaataccgaactcggtgacgcggggtatgagtattttaaaaaggtggttgacgtgcacgtgataaaaaccaccgcaggagcgttgagttttgatagcatgtggaaaggtgcattctgggaagctttgttcacgtttctgtacgttgatatattggacaccacggggacgctgtattccatggccagatttgcagggtttgttgacgccaacggtgatttcgaggggcaatatttcgcgttcatggcggacgcgtcgtcgatcgtggtggggtcgctgctggggacatcgccggtgacggcgtttatcgagtcgtcgacggggatacgggagggggggaggacggggctgacggcggtgacggtggcggggtatttcttgatggcgttttttttcacgccgttgctggcgtcgattccggcgtgggcggtggggccgccgctgatagtggtgggggtgatgatggtgaggtgtgtggtggagattgattgggaggatatgagagaagcgataccggcgtttgtgacgattgtgttgatgccgctgacgtattctattgcttatgggttgatagggggcattgggacgtaccttgtgttgcatgcgtgggactggggaaaggaggtggtgaagaatttttttactaaggagaactttaaggataataataataataataatatacctaattcaaatataaatgtaaatgcaaatagtcgtgttgttgatcatgaagaaggatatgatgataacaaggtgtag

SEQ ID NO: 772 - DNA, 1853 bp, Glycine max
taaccttcaaccttccttccttgattcttaatgaatttttttttcccactttagtccacgttccttatccacactcacatacacattctttcatggctcaactacagctaccaccactctcgagtcgcagttcttcaactgtgactcgaattaatttggtggtggctcaaagttgcatcggcaaatattttaagcttgtcgagcgcaacaccaccttcaccactgagctccgtgctggtaccgccacgtttctcacaatggcctacattcttgctgtcaacgccaccattattgctgactcgggtggcacatgcagcgtctccgattgcacccctctctgctctgacccgaaaacctcaccctcccattgcccgacccatcttttaacccgacccgactcctcatgcaagtacccgcctgtcaacccgggctacgcggcgtgcgtggaacgcacgcgccgtgacctcatcgtggccaccgtggcctcctccctcatgggctccgccgtaatgggcctcttagcgaacctccccttagccctagcgcccggcatgggcgccaacgcgtacttcgcctactccgtggtcgggttccacgggtcgggttccgtaccctacaaaaccgcattaaccgccatcttcttggaaggcctaatcttcctcgtaatctcagccgtcggattccgcgccaaattggccaaactcgttcccaaacccgtccgagtctcctccgccgccggaatcggtctcttcttagccttcattgggcttcaaagcaacgaaggcattggactcatcggattcagcccatcaacactagtcactctcggaggctgcccgaggaacaaactaacggcgttagctccggtcatcacaattaacggcaccgttagtttaatccccggcgccaccgtctccgacaagatactatgttccgggaaccgcatggagagcccaaccctatggcttggtttggtcgggtttttcattattgcttactgtttaatgaagaacataaagggggctatgatatacggcatcgttttcgtaaccgtgatctcgtggttcaggaacacgccggttacggtgttcccgaataccgaactcggtgacgcggggtatgagtattttaaaaaggtggttgacgtgcacgtgataaaaaccaccgcaggagcgttgagttttgatagcatgtggaaaggtgcattctgggaagctttgttcacgtttctgtacgttgatatattggacaccacggggacgctgtattccatggccagatttgcagggtttgttgacgccaacggtgatttcgaggggcaatatttcgcgttcatggcggacgcgtcgtcgatcgtggtggggtcgctgctggggacatcgccggtgacggcgtttatcgagtcgtcgacggggatacgggagggggggaggacggggctgacggcggtgacggtggcggggtatttcttgatggcgttttttttcacgccgttgctggcgtcgattccggcgtgggcggtggggccgccgctgatagtggtgggggtgatgatggtgaggtgtgtggtggagattgattgggaggatatgagagaagcgataccggcgtttgtgacgattgtgttgatgccgctgacgtattctattgcttatgggttgatagggggcattgggacgtaccttgtgttgcatgcgtgggactggggaaaggaggtggtgaagaatttttttactaaggagaactttaaggataataataataataataatatacctaattcaaatataaatgtaaatgcaaatagtcgtgttgttgatcatgaagaaggatatgatgataacaaggtgtag

SEQ ID NO: 773 - DNA, 1219 bp, Glycine max
tgcaccggagcctccccaggagcttcgcctcggtggcttccggtgcggcggtgacagcggagcagagcaaagttttattttgtgccaattttgttgcttctttgatttctatgcatatactacgtctcctctcgcttttcagttttccacagtcatgtgtagttttgaaatatagtcgcagattgacagtgcagccttcctcttgtttcttcttttgagcaagttaagttcactgtttcaagtattttgggatccacaaggtggggacgtaaaggattgggtttccgatggagactgacagacctgacggccggactcccaatcaactgagacccctggtctgctcctgctccatcctacatcgatcccatggctcggccagttgggctcaaggtgaaactaaagtgcttgctgcagtttatgggcccaaagctggaaccaagaagagcgaaaaccccgaaaaagcatccattgaagttatttggaaaccgaagactggacaaattggaaaagtggagaaggagtatgagatgatattgaagagaactttggaaagcatctgcattcgaacaatatatcccaacaccaccacttcggttatagtccaggttgtccacgatgatggtgctcttcttccatgtgcaataaatgcagcatgcgctgcacttgtggatgccggaattcccctaaaacatcttgctgtagcgatatgttgttctgtaacagatagtggctgtattatattggacccgaccaaagatgaagaggagaaaatgaaagcattcatcaatttagtttttccaaatacaattgtttctgtcctcccagagggatcactgcaggcgggtagtgagcctatggcacatggaatcatgacatctattacacagggtgctatgtcagtggatgattatcttcactgcctagagcgagggcgtgctgctagtgcaagattgtctgaatttgtgaggaagaacatagaactgaaatctacaagtgaggcatctaaagctgggtgattttccaatcatttttggatgtagtttacatatttgtctaatttttccctgcaagggcttgagaggagggaatttctctacaggtagtgctacatatttgtcccattcatgaaaatataatttttcttggtcgattataaatttgccaaagctggtttggttagttctcaggagtacttctgaacttcagaatacacaca

SEQ ID NO: 774 - DNA, 691 bp, Glycine max
ataaatgaatggtcttctattcatattctagtcgtaaaactaagagacattacagtttgtattattgtagaagagagagggagagagatggagttgagcatgaaagtgttggtgaaagttgcttcgttgcttttcctattggaattcactgcaacagttgttgatgctcgcttcgatccaagttcattcatcactcagtttctccccaatgctgaagccaacaattactatgttaaatccacaacaaaagcgtgctgtaacagctgtccttgcacaaaatcaatccctccacagtgtcgttgttcagatattggagaaacatgtcactctgcatgcaaaacttgtatttgcactcgctcaattcctccacagtgtcattgcagtgacataaccaacttctgttatgaaccttgcaactcctctgaaaccgaagctcactaggaatattgagcatgttccagtgactaacatgtttgacagagtcactaggctttgttttcatctagctagtacttatgatgtatgggaataaataactactgaatgaataaaagctactaggccaagcagtttgttttctacaaattgctggtcgtggtgtttgttttatttttagtcttgttttagtttattctcacatctgaaatatttttttttaaaggccaactaaatatatcattaatgagaagaa

SEQ ID NO: 775 - DNA, 2805 bp, Glycine max
attttcaaaaacctcagattttgaagaagagggtctgcatcggttcaaaacttgaactttggaccctccttcattctccaaaaaacaccatcggcaatttttagttttttagtcgcagaaacaaagcgcggcgggactctgaaatctctccctctctctcttacaagcttgatgtagaaagagaaaaatatagttttctttctccaaaagccacgaaccatgattctcaatcggggtgcatgctgttttgatcaattccttggtggattgtttatgagagagatccgtgtctagaaaatgatgagtaatggtgatccattggatttgtataagcttttcatggtggtgaaggagaagggtggttatgatgctgtttgtaagaacaagttgtgggatttggtgggggaagaatatgggttgggtgtgaaggttggttcctctgctgaacttgtttatagtaaacatttgagttctctagaggcatgcttaaagaatgctactgatggtaagttccctgagtgtggtttaatagatgatagagttaagtttcacaagcatttgatggaggcgcaagctgaatccttgttggatgactctggtgaggaagaggcgggggatgaactcgagaggatagtgtgtgactgtaaggatgggaggaagttgtgtggtagtaatagagtgaagtatgtgaaaccggagtcaaatgtggctgaactcgagagggtatatgagtatttagatgaaacgaagtcgtgtgttagtgatagtgtgaagggcaagaaatcagattctaatggggatgaatttgataatgtatgtgactttctagatgggagggagttgtgtgatactaatagggtgaagggtgtgagtccagagtctaatggggacaagaaagttcagagcaaaggacttgttgatttggatatgctggacaatgggacggatgagcatattatcagaaacttgtgcagtcttaatactgagaggaatatactggaagagtttgatggggggaaaatattaactgtggatgcatctgatgcagagagcaacatgcctagattgtcggatggaagcaagtgctgtgataatgatgatgatgatgatagtgatgaagtcttgatattggatccatctggtgttgacaaagagatatttggtcgtaagaggaagagagagtctaagtcagaaatgctaagttggattactagcattgctaaaaatccttgtgattccacagtcggttcgattcctgaaaagtctaagtggaagttttacagtagtcaggagatctggaagcaggttttgttgtttcgagaagctgtctttctgaagaaagattttgagacaaccagtgaacagcttaattggcagggacagaaaatgcatccttctatgtatgatgatcgtgttggggcaatgtacaatcttagacagaggttgaaatgtgacaagagagttttattgggaaaaactacatctggaggagtctccttagcttcatctggaggaacacatgtggatttggagaggaccccaagttctcatgctgaagatcgtgctgagaaattgttacctgactccggtactgctcactcaagccttgatagatgtgccagagtgcacatccctttggggccaaaccatcaagctgaagtgccagaatggactgtcataacttatgaggttgattcaaagtggttggggacccaaatatggcctccaaaaactgtaaattccaaatgtcgtctttttgaaagggaccccattggagagggaagacaaaattcatgtggctgccaagtacaaggttctgttgagtgtgtccggttccacattgctaagagaagggctaaagttaagttggaattgggtgaggcgtttcaccaatggaatttacataaggtaggtgaagaagttgggggttcatggacagagcaagaagagaagaagttcaaagatgtggtgaaatcaaaccctgcttcacttgataaatgtttttgggatcatcttttcaaaacatttcctaagaagagcagagaagatttagtcagctactatttcaatgtctttcttttgcagcgcagagcatatcagaataggcatactcctgataacattgacagtgatgatgatgaatcagaattcacaccattgaggaaagtttttggacatcaaacaccaaaacctcgcagcttcaccttgttatcccccaaaaaagccacattcaaaagggaaaataacaagtgaacctcagtcatatcctgagcttcattgagaatgtgaatcaacaattttgtgcgtcttcactgcaccaactttcagtatcaatgggtctttgtctcctagcttagaattttaaatcacccttgattttggggagtaaaaaaatgtaactttaaagtttggtttggtgttgggttaatttaggagagatgaatgatgtttttcagaagctgacaaccatgaagatccgactgctaagaagttgggggttgcttttagtttacatgcttccaattttgagacatcccttctgtctgttggcagtgatatgttgcagctacaggtactgttgcacattttattttcaccaggttttgacaagggttacttaaagttaaaagaacagcatatggaatatatagagcaacattttgttatagagtttcatgaacaaatgcagtgaagtgttatttaaatttcaaccttttttctgatgcgaatttctatttgaatgtttcttgcaatgctatgtagatattgtttttagatcaggtatttgcaagcttgtctattact

SEQ ID NO: 776 - DNA, 372 bp, Glycine max
atgggcgttcttttttctagcaccctggaggaggagagtcctgacgtgaaagcgttccactccgcggagcgctgggagagctacttggaaaagatcaaagagtcccctaagctagttgtgatatatttcacggcgtcctggtgtggcccttgcaaattcatcgctccagtgtttaaccacatggccgcagagtttgcaaacgctgacttcgtcaagatcgacgtggacgaattatctggtgtggcgaaggagtttaaggtggaggcgatgccgacgttcgtgtggtggaaggaaggaaaggaagttgagagggttgtgggagccaataaggacgagctccagaacaagattaagaaacattatcaattgtga

SEQ ID NO: 777 - DNA, 1533 bp, Glycine max
atggcgaacatagacatcgaagggatcttgaagcagcagcctgatgatgggcgcgttccgaagacgaaaatagtgtgtactttgggccccgcttctcgatccgtggaaatgactgagaagcttcttagggctgggatgaacgttgctcgtttcaatttctctcatggcacccacgactatcatcaggaaaccctcaacaatctcaagactgctatgcacaacactggtatactctgtgccgtcatgcttgacactaagggacctgagattcggactggttttctgaaagatggaaaacctattcaacttaaggaaggacaagaaatcaccataactactgattatgacattaagggggatcaggagatgatatccatgagttacaagaagctgcctgtccacttgaagcctggaaacaccatattgtgctctgatgggacgattactctcactgtcttatcttgtgatcctgatgctggtactgttagatgtcgttgtgaaaacactgctacgttgggtgagagaaaaaatgttaaccttcctggtgttgttgttgatctccccacacttactgagaaggataaggaagatattcttcaatggggtgtacccaacaagattgacatgattgctctttcatttgttcgcaaaggctcagatcttgttaatgtccgcaaggttctggggccacatgcaaagactattcagttgatgtctaaggttgagaatcaggaaggagtcctgaattttgacgaaatcctgcgcgagactgatgcattcatggtggcacgaggtgatcttggaatggagatcccagttgaaaagatattcctggcgcagaagatgatgatatacaagtgtaatctggttgggaagccagtggtgactgctacccaaatgcttgaatcaatgataaagtctcccaggccaacccgagctgaagcaactgacgtagccaatgcagttcttgatggaacagattgtgtgatgcttagtggtgaaagtgctgctggggcatacccagaacttgctgtgaaaatcatggctcgtatctgcattgaagcagaatcatcccttgactatggtgccatcttcaaagagatgataaggtctacaccattgccaatgagtccattggagagccttgcatcatctgctgtccgcacagcaaacaaggccaaagcaaaactcattgttgtactgacacgtggcgggtctacagctaagttggttgctaagtataggccagcggttccaatattatcggtggtggttccagtgttgagcacagactcatttgattggacatgcagtgatgagacgccagcaaggcacagcttgatatataggggcttgattccaatattgggggagggatccgccaaggctactgatgcagaatctacagaggtcattctcgaagctgctcttaagtccgcaacacaaaggggcctttgtaagcctggtgatgcagttgttgccctgcatcgtattggcactgcctctgtcataaagatctgcatagtcaaataa

SEQ ID NO: 778 - DNA, 2729 bp, Glycine max
ttatggccgttttagatttacattggattatttaaaattacgtttatatatattagttaacctcaagtgtataacacaaaatgacttttcttttatgtaacggcaaaatgacattactgttgatcacagccagaaagtattacagtttgtttgtctgtataatgttttttcatgttaaaaaaatggtcgttattttgcgcataaaaataaagacatagcatcaacttgtataatggacagctatttgccctaacgcggcaatatcttaagatacaccaagaccaaacatccattaacaacagaaatcttgatccgcttgtgaattactaattaactttccgtcgcaaatgaggaagctgcatccacttttagcagttagaaattgagcacttggcgtttgtagtacctgcagagtcgcatgattttaagcctgaacaactcaccatgcataactaggttcgaacaagtcatactttgtcgatatctttttcaatgttttgctggcattcttaaatcttaatattgtggttataaaagtgggtcctcaagtaatattaaattgaaagttgattcatctgaaaggctgtgtgtagaatcattgatgtattttcttaaatctttgccttgacactccactccataattagaggaaaagaaaagaaggggtggggtggggtgttcatcttttcctttttcctgtccgttcttttttatacattgaaattaaccttccgtaaattcctctctatttggtatgtatagagaaagagagaatgaatgggtaaaatataaatgtagtagctccgttccgtcaatttctctttctctctccaaaattaaaacggggagcgaggatccaacggtcccaattgggtgtgatggttgttatattcatttgaattaatttggttcattttgtgtgtttctcagagaatcgctcttcttccatcctttcctctcctctctccgcatttcccaagagcagatattagaagatggcagacgctgaggatattcaaccccttgtttgcgacaatggaacaggaatggttaaggcaggatttgcaggagatgatgccccacgtgctgtgtttcctagcattgttggtcgtcctcgtcacactggtgtgatggttggtatgggccagaaagatgcatatgttggtgatgaagcacagtctaaacgtggtattctgactctcaagtatccgattgagcatggtattgttagcaactgggatgatatggaaaagatttggcatcataccttctataatgagcttcgtgtggccccagaagaacatccagttctgttgacggaggctcctcttaaccctaaggctaaccgtgagaagatgacccaaattatgtttgagacctttaatgcccctgctatgtatgttgctattcaggctgttctttcactgtatgccagtggccgtacgactggtattgtgttggattctggggatggtgtcagccacacagtgcctatctatgagggttatgccctcccacatgcaatccttcgtcttgatttgggtggtcgtgacctcacagatttcttgatgaagattttgactgaacgtggatattcttttaccacctcagcagagcgtgaaattgtgagggatatgaaggaaaagctggcttacatagccctcgactatgagcaagagctagagacatccaagaccagctcttcagtggagaagagctatgagttgcctgatgggcaggttatcactattggcgctgagcgtttcaggtgtccggaggtcttgtaccaaccatccatggtaggaatggaagcatcaggcattcatgaaacaacatacaactccataatgaaatgtgatgttgacatcaggaaagacctgtacggtaacattgtcctttcaggaggtacaaccatgtttcctggcatcgctgatagaatgagcaaggaaatttctgctttagccccaagtagcatgaagatcaaggtggtagcacctcctgagagaaagtacagtgtctggattggaggttctatcttggcatccctgagcaccttccagcagatgtggattgcgaaggcagagtacgacgagtctggaccatcaattgttcatagaaagtgcttctaaattgtttggttgatagggttattgaagaaaaagatagctgttttattcctcgggaagaagtgctgcttgcttgtaaccctttcattctattctaacttttgttatctgtttacgttattctctggagtaatgatttggagaaggcgaggagtttgttttgtcaaaacggtgcaattcttcagtattattatatattttgattttgattttttgagattcattatgcgtctgaattagcataaactatcaaatgaactatggtatgcaaaattatgatcccaatattttgcattagatatttttatagccgaggagggtacggctaatatgatcattgctattgagatatgggattatattctaggttcgcggacacgggatatgaaaattcggttattcttcccacttgattgacatttagcaatgggaattcaggaagaatttctctgcataccagttctgtacccccatggacatgagcacaagctctctaatcaaagattcaccttggaacccgaaatttggaaccagttcataggattactaatgatggagcaacgataagagcaaccaaaactgagggttgctgtataatattac

SEQ ID NO: 779 - DNA, 1026 bp, Glycine max
atgtcgacctcttccattaacgggtggtgcctctcttccatctccccagccaaaacctctctcaagaaggccacattaggcccttctgtcttcgcaaccgttagcactccttcttctccttcttcttcttcttcttcttccttcccttctctcattcaagacaggcctgtctttgctgcccctgcccccatcatcaccccaactgtgagagaggatatggcaaaggaatacgagcaagctattgaagaactccagaaattgttgagggagaagagtgaactcaaagccacagctgctgagaaagtggagcagataacagcttctctgggaacatcatcatctgatggcatcccatcatcagaagcctcagacaggatcaaagctggtttcattcacttcaagaaggagaaatatgacaagaatccagctttgtatggtgaacttgccaaaggccagagccccaagtttatggtgtttgcttgctcagactcaagggtgtgcccatctcatgtgctagatttccaaccaggagaggcctttgtggtcagaaatgttgctaacattgtcccaccatatgaccagtcaaaatacgctggaactggggcagcagttgagtatgctgttttgcatcttaaggtgtctgagattgtggtcattggacacagtgcttgtggtggtattaaggggcttctgtctttcccatatgatggaacctactctactgattttattgaggagtgggtcaaaattggcttgcctgcaaaggcaaaggtgaagacacaacatggggatgcaccttttgctgagttgtgctcacactgtgagaaggaagctgtgaatgtttcccttggaaaccttctaacatacccatttgttagagatggcttggtgaacaagacattgtcactaaaaggaggatactatgactttgttaagggatcttttgagctctggggccttcagtttggccttgcatcctctttctccgttaaagatgtggccaccattctgcattggaagctatag

SEQ ID NO: 780 - DNA, 1141 bp, Glycine max
gaatataaaaataatggggtgcataaaacaattttcctagttttattgcaacacgtacggtacacaaacacagccctaaatccaggcccaaaccaagacgtagttctgcttctcagttctctcgaatcaatccggaatcccaaacccctaatccctaatcaatcgcaagttcgaatccctaatttcaacctgttcttcctcaacgtgcgtcgtgagcgagttaagcagggaaagacaaagcgattatggacggttcacgacggctactaggacagtctgtaggggttttcaatgaagggatttgtttagttttatctcgctggtcggctcttcgatcggctgttgagaatgaatggggcggccgtgagtcccgccttaaagccgatcaacttgccggtgacattcttacctggttcactcaatccaaagagccactttatattgatgacttagaagacatactggatcaaggtatgctttctctcaatgtagaggtcgaggatggcagcgttgaagaggtagctgaaaaactaatggttatgcatgaagaattcttagaaggtaattttagttcttttgaagatctcaggaaagccaatcttgagcaagctactcttcctcatgtaacacagattgtaaacgaagacgattcagatgaagatggtgatcatgatgaaaaaatgattgtggatgataattcttcaaacatgaatccggagatttcaacatctgattcaaacatgaattcagtgaacaggccagtaaatgagcctctaccaaaggtttcaggcaaagcagatgatggatgggttgtagtttcaaacaaaagaaataagggaagaaaaaattagataaaaagtatttaatttttttaaggatgtgtagtcctcgttcatttgcttgtgctttttgaggtattgcaaaccttcttgaggtgtgtaactatatatctcggatttttttgttttacttattttaatgtctcctccgtctgaggtctttagaaaaaaaatggatgagcatatgttgtaggaaatcctacattattttttggtctgtctatgaaacattttatgtttgtagtttatgctaccgaaagttgtgtcttatcttgcattgaagtgatccaattatcttccag

SEQ ID NO: 781 - DNA, 6428 bp, Glycine max
tcagtctctctccgagccacacttgaaaaaaatccccaaaattttgttctctgaacaaaatctcgccgtttcggttcctattctctttctcccaaccaatctctttctctctcatcggttgcgtttccttcgcacgaaatcgctggatttccgctatttctacctcgatcgctcgatctggagcgagacgaagaagaagaagaacccctttccttgataattgggaacacacacagaaacaccgaaactgtgccctaaaaagcaaaacccctctcacttcttccccgatggcggattggaggaggagatctgcgacgccgagcctgatctagggttttcgaatctagggttttgaggaggaggaggaggaggaggaggcgtgccaatttcgatttcgaattgatgtttcttttcagggacgaggctcggatcgactcggaagatggcggattatgcatgggtgcggtcgtgaccagtcgaaacacaatcggcacatgtggcctgtacctgctaacgcgaccactgatggacgcaagattcgcgctggtgattgtgcacttttcaaggcacccagggactcccctccttttattggaataattcgcaagttaacatttgataaagaagaaagtccgagtttagaagtgaattggctataccgacctgctgatttgaagcttgctaaagggattgtactggaagctgctccaaacgaagttttctactcctttcacaaggatgaaacacctgctgcatcattactccatccgtgtaaagtcgcatttcttcgtaagggtgttgaacttccttcagggatatccgcatttgtctgtcgacgagtatatgacattgagaacaattgtttatggtggttaactgataaggattaccttaatgaacgacaggaagaagttaaccagctattagacaagacaaaactagaaatgcatggggctgtgcagtcaggaggccgttctccaaagcccttgaatggtccaacatcaacacagtcattgaaatctggttctgacaacgttcaaaatagttcttcttttggtgcacagggtaaggggaaaaaaagagagcggggtgatcaggtttctgattcatctaaaaaggagcggttatttaaggtagaagatggagattctggtcaatttagattggaaagcatgttaaagtctgagattgctaaaataactgataataaaggtgggcttgtggactttgaaggagttgaaagactggtacagcttatgcaacctgatagtggtgataaaaaaatagatttggcagggcgaatgatgcttgtcgatgtaattgcacttacggaccggtatgagtgtctatgcgggtttgtacaacacaggggtttgcctgtgttggacgaatggctgcaggaggtccacaagggcaaaattggtgaaggaaatatgcctaaggaaagtgataagtcagttgatgagtttttgttagctttacttcgtgcattagataagcttcctgtgaaccttcatgcactgcaaacctgtaatgttggaaagtctgttaatcatttacgcacccacaaaaattatgaaattcagaggaaagctaggagtttagtggacacatggaagagacgtgtggaagctgaaatgaatatgaatgattcgaagtctggttcaaaccgtaccatgtcttggccagcaaagtcagcaaattctgagtctcctcaggttggaaataggaaaacaggaggatcctctgataatgttgcaaagagctcttcagttcaaccctcaatatctaaaaattcccaatctaagttaagttctggagaagcactgtccaagtcctcttcatctcctggctcaactaagctaatgactacctcagcggtcagtaactcaaaagatcaaaacagtaaagtcttggttggagctgcaacgtcagatctgcctctgacacctatcaaggaggagaggagcagcagttctagtcaatctcaaaataacagtatatcttgttctagtgaacatgctaaaactattggttccagcagggaagattcgaagagctccactgcagtgtcagcgagtgggggcaaaattcctggtggtgcttctcgaacacgcaagtccagcaatgggctacatgttactggtgttgcagtaggtccgaaggagcacagctctgcaaaaaattcagctaggaattcaccttctgaaaaagtttctccaactcgagtcccccatgaaaaatcagctgaccagccccttactgatcaagggaataatcagcgattgattctccggttgccaaacactggtcacagtccttcaaggggagctagcggtggctcttatgaagaaccaggtatcacgtgcagcaaagcttcttctcctgctgacaggaatgagaatcaggacagaagaatgaaaactagacctgagtgtttgctgacccatgtgtcaaatatgatgaatgaggcatgtgatgctagtgaagctttgcttggtgttgacgaaggtaagggccctcaaacggttgatgagcgatgcagggctaatgaagatggtgataaggtagcagaatcatcaaaaccggctagtttgtcatctggatttgtttccagatcagggcagacttatgatttaagccccatgaatgcattagttgaaagctgtgtgaaaatttctgaagcaagtgcatccgtgtcccatggagatgatgggatgaacctactagctactgtggctgctggggaaatatcaagatctgaaaatgcctcacctatggtatcccctgagagaaagtctcctcctgcagatgaattgagctcaggcaatgatttcaagttaaaacattctggtgaagcagctgtttgctctctttcacagtcggatggtggggctactgccgagcatcctttgaacatatttgattcattgcagataaaaaatgatttgaggcatcctgctacaacttcaggagatggtgacaccatttcatccagttgtgttgagagaagtggtgatgggagatcgcagataaatagctcccctacagatttcttacaagctgaaggtccatgcttacggcctgaaaccaaggaggatacttctgaaactatattgccagttaaaaaggagactaatgcagaccctggagactgtaaattaaagtcaaggacttcttttgatgatgatcagaaggttgatcacatgaatgaggaaaccgctgaggatgagaaaatgttggttccaaaagctgttgcaagtgttaagtctgaaaatgaatcgggtgaaaaacatcctgagttatcctcaggtgtggataatgagaaccagattagtgcagagaaatcaacaggtactggtatactagtgcaaaaggcctctccagtttctgaaaactgtgagtctttgtatttaaaaaaggagtcacctacttctggtaatgctgtaatggtatccagggatgaaaatgctgatgacacgaagtcagttgtgattgagcctgatgaaagaagaacagggcaggatttatcagtttcagatgatgttaatgaacgtgctgatactatgggtagaaaagaggctattggtcagtgttctggctcatcagttcattcagatttaccaacagtgcctagggaagagaatgatgcatttaaagcatctgagcgaaagttggatacaaataaatctgaggttgcaggagagaggcatgcatgttctgctgctgggtctgatactgctgtaaaactcgacttcgatttaaacgaaggctttcctgttgatgatgtaagccaaggggagattgctagacaggaagatcctaccacatcatctgcagttcatgttccttgcccaatgcctttccctatgacatccatctctggggtcttccatgcttcaattacagtggcatctgctgccaaagggccggttgttccacctgaaaacccattgcggattaagggggagcttggatggaaagggtctgctgctaccagtgcatttcggccagctgaacctaggaaaaatgctgagacaccgcccactactaatgatattgcttctgttgatgtcacttctatcaaacaaggtcgcgctcccttagattttgatttaaatgtggcagatgaaagatgttttgaggatgtgggttcgtgtgcttctttagaagctgggccacatgatcgtagcactgggggatttgatttaaataaatttgatgagactcctgaaattggtactttcttgataagcaaactggatattccttctttaccaagtaagccttcgttgtccagtgggttatctaatggcggaagtgtctcaagagactttgacttaaataatggaccaggccttgatgaagttgggagtgaagtcccaacacgtagtcagccaatgaaaagtactgtaccatttccaactgctgttcatggcacgagagcaaacaatgctgaatttgggaattattctgcatggtttcctcctggcaatacttattctgcaattactgtcccaccacttctgtccggcagaggggagcagagttatgttgctggtgctggggcgcaacgtataatgggtcctacaggtagtgctccttttggtcctgaaatctacaggggaccagtgcttccatcctctccagctgttgcttatccacctactacgccttttccctatccaggatttccatttgaaaccaattttccattatcttcaaactctttgtctgtttgttcaacagcatttatggattcgtcaactgtgggtggattatgctttcctaccatgccctcacagccagttgggtctggtggtgttgtttcatctacgtatccccgtccatatgttatgagtcttccaggtggtacaagtaatgtgattcctgacagcagaaaatggggaagtcaaagtctggatcttaattcgggccccggtggtacggatactgaacggagagatgatagattgccttctggattgaggcaaatgtctgtccccaattcacaggcctcgatggaggaccacttgaagatgtttcagatggcaggtgcattgaaaagaaaagaacctgatggtggttggggggagggagccgagagattcggttacacgcaacattcatggcagtagtgtcatggctcttcaacgcaaatattcaagagctttttatggaaaatgtcggaaaattggggatatttttgagtgttgagccatggacaatgagcagagatgttacccttgctgctgatatgcttcttgaattctgacttgataaagcgatcagagcctctgatgcagttgttttgtatgaatctgctcccttattgtcgcttgcagataaagtttttcctgtgtagatatctaactgaaacagttggtgtgataatgccgcctagaatcagagaaatgggcatcaagtgtttgactgtgactgctctgcaacagcaccgagcccaatccattctcgagcatttggaaggagaggattggatgtctgaactggctaggcttgaggccagtttgtctttctttaaatcatttttttttcaacttttgttacatatatagttattgctgtagtcttgactctggaattttgtcacttatcacattctggttattggtatatgcacaggttggccaatgtgtcacttctctctcttattgttatcgccttgcgctttcaacattttcttgttggtatcacaactggaattggttcgtagagttcctttgaattcttcgtatatctaactaacagtatatacagccgtgtgattcgttagcgctcattatatcataaatgagttgtactaactactaagtgagcatatatgcatgcgtacaacaaacatgatgcactctccttccaagcaatactttctcttttagctaagtctagttcattgatcctcgttgccgagttactttaaaagaagtggaagaatattgtttcttggagtataaaacccgaacaatatatgcatatattagtggcgtgcttgtagttacgaacggaattgttatttatctgttctttctattcgttcctacagtgcgtttgctcaacacttttgttctcagcacctatctctttaagagtttacacttgaataaactcttgaataagagcggtggaaggagaattcaccatattggttagatgttccttttctttttttgccctgcaagatgtttctgagggttgtactctatttatatttatgatactaattgctcgcccttaggccaaccatcatacaaaacctcttccacgtctgaagccaattcaatcgatcgcaaaaatgattgtgttctgtgttattagcctaaagaaagcatgcgcgagagagacagagtttttccctttctggatttgaatttcaatgtattgctaaacttgtaaaaatttgttgtttg

SEQ ID NO: 782 - DNA, 6300 bp, Glycine max
tccgagccacacttgaaaaaaatccccaaaattttgttctctgaacaaaatctcgccgtttcggttcctattctctttctcccaaccaatctctttctctctcatcggttgcgtttccttcgcacgaaatcgctggatttccgctatttctacctcgatcgctcgatctggagcgagacgaagaagaagaagaacccctttccttgataattgggaacacacacagaaacaccgaaactgtgccctaaaaagcaaaacccctctcacttcttccccgatggcggattggaggaggagatctgcgacgccgagcctgatctagggttttcgaatctagggttttgaggaggaggaggaggaggaggaggcgtgccaatttcgatttcgaattgatgtttcttttcagggacgaggctcggatcgactcggaagatggcggattatgcatgggtgcggtcgtgaccagtcgaaacacaatcggcacatgtggcctgtacctgctaacgcgaccactgatggacgcaagattcgcgctggtgattgtgcacttttcaaggcacccagggactcccctccttttattggaataattcgcaagttaacatttgataaagaagaaagtccgagtttagaagtgaattggctataccgacctgctgatttgaagcttgctaaagggattgtactggaagctgctccaaacgaagttttctactcctttcacaaggatgaaacacctgctgcatcattactccatccgtgtaaagtcgcatttcttcgtaagggtgttgaacttccttcagggatatccgcatttgtctgtcgacgagtatatgacattgagaacaattgtttatggtggttaactgataaggattaccttaatgaacgacaggaagaagttaaccagctattagacaagacaaaactagaaatgcatggggctgtgcagtcaggaggccgttctccaaagcccttgaatggtccaacatcaacacagtcattgaaatctggttctgacaacgttcaaaatagttcttcttttggtgcacagggtaaggggaaaaaaagagagcggggtgatcaggtttctgattcatctaaaaaggagcggttatttaaggtagaagatggagattctggtcaatttagattggaaagcatgttaaagtctgagattgctaaaataactgataataaaggtgggcttgtggactttgaaggagttgaaagactggtacagcttatgcaacctgatagtggtgataaaaaaatagatttggcagggcgaatgatgcttgtcgatgtaattgcacttacggaccggtatgagtgtctatgcgggtttgtacaacacaggggtttgcctgtgttggacgaatggctgcaggaggtccacaagggcaaaattggtgaaggaaatatgcctaaggaaagtgataagtcagttgatgagtttttgttagctttacttcgtgcattagataagcttcctgtgaaccttcatgcactgcaaacctgtaatgttggaaagtctgttaatcatttacgcacccacaaaaattatgaaattcagaggaaagctaggagtttagtggacacatggaagagacgtgtggaagctgaaatgaatatgaatgattcgaagtctggttcaaaccgtaccatgtcttggccagcaaagtcagcaaattctgagtctcctcaggttggaaataggaaaacaggaggatcctctgataatgttgcaaagagctcttcagttcaaccctcaatatctaaaaattcccaatctaagttaagttctggagaagcactgtccaagtcctcttcatctcctggctcaactaagctaatgactacctcagcggtcagtaactcaaaagatcaaaacagtaaagtcttggttggagctgcaacgtcagatctgcctctgacacctatcaaggaggagaggagcagcagttctagtcaatctcaaaataacagtatatcttgttctagtgaacatgctaaaactattggttccagcagggaagattcgaagagctccactgcagtgtcagcgagtgggggcaaaattcctggtggtgcttctcgaacacgcaagtccagcaatgggctacatgttactggtgttgcagtaggtccgaaggagcacagctctgcaaaaaattcagctaggaattcaccttctgaaaaagtttctccaactcgagtcccccatgaaaaatcagctgaccagccccttactgatcaagggaataatcagcgattgattctccggttgccaaacactggtcacagtccttcaaggggagctagcggtggctcttatgaagaaccaggtatcacgtgcagcaaagcttcttctcctgctgacaggaatgagaatcaggacagaagaatgaaaactagacctgagtgtttgctgacccatgtgtcaaatatgatgaatgaggcatgtgatgctagtgaagctttgcttggtgttgacgaaggtaagggccctcaaacggttgatgagcgatgcagggctaatgaagatggtgataaggtagcagaatcatcaaaaccggctagtttgtcatctggatttgtttccagatcagggcagacttatgatttaagccccatgaatgcattagttgaaagctgtgtgaaaatttctgaagcaagtgcatccgtgtcccatggagatgatgggatgaacctactagctactgtggctgctggggaaatatcaagatctgaaaatgcctcacctatggtatcccctgagagaaagtctcctcctgcagatgaattgagctcaggcaatgatttcaagttaaaacattctggtgaagcagctgtttgctctctttcacagtcggatggtggggctactgccgagcatcctttgaacatatttgattcattgcagataaaaaatgatttgaggcatcctgctacaacttcaggagatggtgacaccatttcatccagttgtgttgagagaagtggtgatgggagatcgcagataaatagctcccctacagatttcttacaagctgaaggtccatgcttacggcctgaaaccaaggaggatacttctgaaactatattgccagttaaaaaggagactaatgcagaccctggagactgtaaattaaagtcaaggacttcttttgatgatgatcagaaggttgatcacatgaatgaggaaaccgctgaggatgagaaaatgttggttccaaaagctgttgcaagtgttaagtctgaaaatgaatcgggtgaaaaacatcctgagttatcctcaggtgtggataatgagaaccagattagtgcagagaaatcaacaggtactggtatactagtgcaaaaggcctctccagtttctgaaaactgtgagtctttgtatttaaaaaaggagtcacctacttctggtaatgctgtaatggtatccagggatgaaaatgctgatgacacgaagtcagttgtgattgagcctgatgaaagaagaacagggcaggatttatcagtttcagatgatgttaatgaacgtgctgatactatgggtagaaaagaggctattggtcagtgttctggctcatcagttcattcagatttaccaacagtgcctagggaagagaatgatgcatttaaagcatctgagcgaaagttggatacaaataaatctgaggttgcaggagagaggcatgcatgttctgctgctgggtctgatactgctgtaaaactcgacttcgatttaaacgaaggctttcctgttgatgatgtaagccaaggggagattgctagacaggaagatcctaccacatcatctgcagttcatgttccttgcccaatgcctttccctatgacatccatctctggggtcttccatgcttcaattacagtggcatctgctgccaaagggccggttgttccacctgaaaacccattgcggattaagggggagcttggatggaaagggtctgctgctaccagtgcatttcggccagctgaacctaggaaaaatgctgagacaccgcccactactaatgatattgcttctgttgatgtcacttctatcaaacaaggtcgcgctcccttagattttgatttaaatgtggcagatgaaagatgttttgaggatgtgggttcgtgtgcttctttagaagctgggccacatgatcgtagcactgggggatttgatttaaataaatttgatgagactcctgaaattggtactttcttgataagcaaactggatattccttctttaccaagtaagccttcgttgtccagtgggttatctaatggcggaagtgtctcaagagactttgacttaaataatggaccaggccttgatgaagttgggagtgaagtcccaacacgtagtcagccaatgaaaagtactgtaccatttccaactgctgttcatggcacgagagcaaacaatgctgaatttgggaattattctgcatggtttcctcctggcaatacttattctgcaattactgtcccaccacttctgtccggcagaggggagcagagttatgttgctggtgctggggcgcaacgtataatgggtcctacaggtagtgctccttttggtcctgaaatctacaggggaccagtgcttccatcctctccagctgttgcttatccacctactacgccttttccctatccaggatttccatttgaaaccaattttccattatcttcaaactctttgtctgtttgttcaacagcatttatggattcgtcaactgtgggtggattatgctttcctaccatgccctcacagccagttgggtctggtggtgttgtttcatctacgtatccccgtccatatgttatgagtcttccaggtggtacaagtaatgtgattcctgacagcagaaaatggggaagtcaaagtctggatcttaattcgggccccggtggtacggatactgaacggagagatgatagattgccttctggattgaggcaaatgtctgtccccaattcacaggcctcgatggaggaccacttgaagatgtttcagatggcaggtgcattgaaaagaaaagaacctgatggtggttggggggagggagccgagagattcggttacacgcaacattcatggcagtagtgtcatggctcttcaacgcaaatattcaagagcagctttttatggaaaatgtcggaaaattggggatatttttgagtgttgagccatggacaatgagcagagatgttacccttgctgctgatatgcttcttgaattctgacttgataaagcgatcagagcctctgatgcagttgttttgtatgaatctgctcccttattgtcgcttgcagataaagtttttcctgtgtagatatctaactgaaacagttggtgtgataatgccgcctagaatcagagaaatgggcatcaagtgtttgactgtgactgctctgcaacagcaccgagcccaatccattctcgagcatttggaaggagaggattggatgtctgaactggctaggcttgaggttggccaatgtgtcacttctctctcttattgttatcgccttgcgctttcaacattttcttgttggtatcacaactggaattggttcgtagagttcctttgaattcttcgtatatctaactaacagtatatacagccgtgtgattcgttagcgctcattatatcataaatgagttgtactaactactaagtgagcatatatgcatgcgtacaacaaacatgatgcactctccttccaagcaatactttctcttttagctaagtctagttcattgatcctcgttgccgagttactttaaaagaagtggaagaatattgtttcttggagtataaaacccgaacaatatatgcatatattagtggcgtgcttgtagttacgaacggaattgttatttatctgttctttctattcgttcctacagtgcgtttgctcaacacttttgttctcagcacctatctctttaagagtttacacttgaataaactcttgaataagagcggtggaaggagaattcaccatattggttagatgttccttttctttttttgccctgcaagatgtttctgagggttgtactctatttatatttatgatactaattgctcgcccttaggccaaccatcatacaaaacctcttccacgtctgaagccaattcaatcgatcgcaaaaatgattgtgttctgtgttattagcctaaagaaagcatgcgcgagagagacagagtttttccctttctggatttgaatttcaatgtattgctaaacttgtaaaaatttgttgtttg

SEQ ID NO: 783 - DNA, 6297 bp, Glycine max
tccgagccacacttgaaaaaaatccccaaaattttgttctctgaacaaaatctcgccgtttcggttcctattctctttctcccaaccaatctctttctctctcatcggttgcgtttccttcgcacgaaatcgctggatttccgctatttctacctcgatcgctcgatctggagcgagacgaagaagaagaagaacccctttccttgataattgggaacacacacagaaacaccgaaactgtgccctaaaaagcaaaacccctctcacttcttccccgatggcggattggaggaggagatctgcgacgccgagcctgatctagggttttcgaatctagggttttgaggaggaggaggaggaggaggaggcgtgccaatttcgatttcgaattgatgtttcttttcagggacgaggctcggatcgactcggaagatggcggattatgcatgggtgcggtcgtgaccagtcgaaacacaatcggcacatgtggcctgtacctgctaacgcgaccactgatggacgcaagattcgcgctggtgattgtgcacttttcaaggcacccagggactcccctccttttattggaataattcgcaagttaacatttgataaagaagaaagtccgagtttagaagtgaattggctataccgacctgctgatttgaagcttgctaaagggattgtactggaagctgctccaaacgaagttttctactcctttcacaaggatgaaacacctgctgcatcattactccatccgtgtaaagtcgcatttcttcgtaagggtgttgaacttccttcagggatatccgcatttgtctgtcgacgagtatatgacattgagaacaattgtttatggtggttaactgataaggattaccttaatgaacgacaggaagaagttaaccagctattagacaagacaaaactagaaatgcatggggctgtgcagtcaggaggccgttctccaaagcccttgaatggtccaacatcaacacagtcattgaaatctggttctgacaacgttcaaaatagttcttcttttggtgcacagggtaaggggaaaaaaagagagcggggtgatcaggtttctgattcatctaaaaaggagcggttatttaaggtagaagatggagattctggtcaatttagattggaaagcatgttaaagtctgagattgctaaaataactgataataaaggtgggcttgtggactttgaaggagttgaaagactggtacagcttatgcaacctgatagtggtgataaaaaaatagatttggcagggcgaatgatgcttgtcgatgtaattgcacttacggaccggtatgagtgtctatgcgggtttgtacaacacaggggtttgcctgtgttggacgaatggctgcaggaggtccacaagggcaaaattggtgaaggaaatatgcctaaggaaagtgataagtcagttgatgagtttttgttagctttacttcgtgcattagataagcttcctgtgaaccttcatgcactgcaaacctgtaatgttggaaagtctgttaatcatttacgcacccacaaaaattatgaaattcagaggaaagctaggagtttagtggacacatggaagagacgtgtggaagctgaaatgaatatgaatgattcgaagtctggttcaaaccgtaccatgtcttggccagcaaagtcagcaaattctgagtctcctcaggttggaaataggaaaacaggaggatcctctgataatgttgcaaagagctcttcagttcaaccctcaatatctaaaaattcccaatctaagttaagttctggagaagcactgtccaagtcctcttcatctcctggctcaactaagctaatgactacctcagcggtcagtaactcaaaagatcaaaacagtaaagtcttggttggagctgcaacgtcagatctgcctctgacacctatcaaggaggagaggagcagcagttctagtcaatctcaaaataacagtatatcttgttctagtgaacatgctaaaactattggttccagcagggaagattcgaagagctccactgcagtgtcagcgagtgggggcaaaattcctggtggtgcttctcgaacacgcaagtccagcaatgggctacatgttactggtgttgcagtaggtccgaaggagcacagctctgcaaaaaattcagctaggaattcaccttctgaaaaagtttctccaactcgagtcccccatgaaaaatcagctgaccagccccttactgatcaagggaataatcagcgattgattctccggttgccaaacactggtcacagtccttcaaggggagctagcggtggctcttatgaagaaccaggtatcacgtgcagcaaagcttcttctcctgctgacaggaatgagaatcaggacagaagaatgaaaactagacctgagtgtttgctgacccatgtgtcaaatatgatgaatgaggcatgtgatgctagtgaagctttgcttggtgttgacgaaggtaagggccctcaaacggttgatgagcgatgcagggctaatgaagatggtgataaggtagcagaatcatcaaaaccggctagtttgtcatctggatttgtttccagatcagggcagacttatgatttaagccccatgaatgcattagttgaaagctgtgtgaaaatttctgaagcaagtgcatccgtgtcccatggagatgatgggatgaacctactagctactgtggctgctggggaaatatcaagatctgaaaatgcctcacctatggtatcccctgagagaaagtctcctcctgcagatgaattgagctcaggcaatgatttcaagttaaaacattctggtgaagcagctgtttgctctctttcacagtcggatggtggggctactgccgagcatcctttgaacatatttgattcattgcagataaaaaatgatttgaggcatcctgctacaacttcaggagatggtgacaccatttcatccagttgtgttgagagaagtggtgatgggagatcgcagataaatagctcccctacagatttcttacaagctgaaggtccatgcttacggcctgaaaccaaggaggatacttctgaaactatattgccagttaaaaaggagactaatgcagaccctggagactgtaaattaaagtcaaggacttcttttgatgatgatcagaaggttgatcacatgaatgaggaaaccgctgaggatgagaaaatgttggttccaaaagctgttgcaagtgttaagtctgaaaatgaatcgggtgaaaaacatcctgagttatcctcaggtgtggataatgagaaccagattagtgcagagaaatcaacaggtactggtatactagtgcaaaaggcctctccagtttctgaaaactgtgagtctttgtatttaaaaaaggagtcacctacttctggtaatgctgtaatggtatccagggatgaaaatgctgatgacacgaagtcagttgtgattgagcctgatgaaagaagaacagggcaggatttatcagtttcagatgatgttaatgaacgtgctgatactatgggtagaaaagaggctattggtcagtgttctggctcatcagttcattcagatttaccaacagtgcctagggaagagaatgatgcatttaaagcatctgagcgaaagttggatacaaataaatctgaggttgcaggagagaggcatgcatgttctgctgctgggtctgatactgctgtaaaactcgacttcgatttaaacgaaggctttcctgttgatgatgtaagccaaggggagattgctagacaggaagatcctaccacatcatctgcagttcatgttccttgcccaatgcctttccctatgacatccatctctggggtcttccatgcttcaattacagtggcatctgctgccaaagggccggttgttccacctgaaaacccattgcggattaagggggagcttggatggaaagggtctgctgctaccagtgcatttcggccagctgaacctaggaaaaatgctgagacaccgcccactactaatgatattgcttctgttgatgtcacttctatcaaacaaggtcgcgctcccttagattttgatttaaatgtggcagatgaaagatgttttgaggatgtgggttcgtgtgcttctttagaagctgggccacatgatcgtagcactgggggatttgatttaaataaatttgatgagactcctgaaattggtactttcttgataagcaaactggatattccttctttaccaagtaagccttcgttgtccagtgggttatctaatggcggaagtgtctcaagagactttgacttaaataatggaccaggccttgatgaagttgggagtgaagtcccaacacgtagtcagccaatgaaaagtactgtaccatttccaactgctgttcatggcacgagagcaaacaatgctgaatttgggaattattctgcatggtttcctcctggcaatacttattctgcaattactgtcccaccacttctgtccggcagaggggagcagagttatgttgctggtgctggggcgcaacgtataatgggtcctacaggtagtgctccttttggtcctgaaatctacaggggaccagtgcttccatcctctccagctgttgcttatccacctactacgccttttccctatccaggatttccatttgaaaccaattttccattatcttcaaactctttgtctgtttgttcaacagcatttatggattcgtcaactgtgggtggattatgctttcctaccatgccctcacagccagttgggtctggtggtgttgtttcatctacgtatccccgtccatatgttatgagtcttccaggtggtacaagtaatgtgattcctgacagcagaaaatggggaagtcaaagtctggatcttaattcgggccccggtggtacggatactgaacggagagatgatagattgccttctggattgaggcaaatgtctgtccccaattcacaggcctcgatggaggaccacttgaagatgtttcagatggcaggtgcattgaaaagaaaagaacctgatggtggttggggggagggagccgagagattcggttacacgcaacattcatggcagtagtgtcatggctcttcaacgcaaatattcaagagctttttatggaaaatgtcggaaaattggggatatttttgagtgttgagccatggacaatgagcagagatgttacccttgctgctgatatgcttcttgaattctgacttgataaagcgatcagagcctctgatgcagttgttttgtatgaatctgctcccttattgtcgcttgcagataaagtttttcctgtgtagatatctaactgaaacagttggtgtgataatgccgcctagaatcagagaaatgggcatcaagtgtttgactgtgactgctctgcaacagcaccgagcccaatccattctcgagcatttggaaggagaggattggatgtctgaactggctaggcttgaggttggccaatgtgtcacttctctctcttattgttatcgccttgcgctttcaacattttcttgttggtatcacaactggaattggttcgtagagttcctttgaattcttcgtatatctaactaacagtatatacagccgtgtgattcgttagcgctcattatatcataaatgagttgtactaactactaagtgagcatatatgcatgcgtacaacaaacatgatgcactctccttccaagcaatactttctcttttagctaagtctagttcattgatcctcgttgccgagttactttaaaagaagtggaagaatattgtttcttggagtataaaacccgaacaatatatgcatatattagtggcgtgcttgtagttacgaacggaattgttatttatctgttctttctattcgttcctacagtgcgtttgctcaacacttttgttctcagcacctatctctttaagagtttacacttgaataaactcttgaataagagcggtggaaggagaattcaccatattggttagatgttccttttctttttttgccctgcaagatgtttctgagggttgtactctatttatatttatgatactaattgctcgcccttaggccaaccatcatacaaaacctcttccacgtctgaagccaattcaatcgatcgcaaaaatgattgtgttctgtgttattagcctaaagaaagcatgcgcgagagagacagagtttttccctttctggatttgaatttcaatgtattgctaaacttgtaaaaatttgttgtttg

SEQ ID NO: 784 - DNA, 2045 bp, Glycine max
gcgggtgttgacttacgttgttccattctttgcaatggcatcatcccttagcacttctcatccttaaccattatctgtcaaaaactcactgcatcaaaaccttctaattcaagtcgcatgttcttctaccttaaggaagaagtgaagaaccatgagccaacctacactatttagcagtggattcgagcttgcatcttctgtgacaagctctgtccttcttcacagatcatggaatgttatcacgtcccgttatgccggaatcgttacaaacgtgggagagggagtatcatggaaagtttatagagaaccaggttcggatttgacgattatagcctttgaggtcaagctagatttttctaatgttcaagcgggtttggtttcatctaatactctcagggagaataatttccatcactttgagtttctgtgtaccaagaaagatccatttttttctgttaacaagactgcaatttcactcttttctgaaaactatgagaagcttgatcaactgaaatccgagattaatagttcaactaaattgattgttactgggcatggtcttggaggagcagttgcttctctctttactatatcgctattaaatagcattggttctggaaagaatcgcccactctgcatcacctttggttcaccccttattggtgacaagaaattgcaacaagccatatcacgtagttctaattggaattcttgctttctacacgttgtgtcactcaaagacccacttccaacgctcttcattacaaactatagttcttcacctgctgtattgactcctgaaacaagtggctacatgccttttggaacatttttcttgtgttctgatgcaaactccacttgttttgagaaccctgactctattttggaacttctcattgcaatgggctcaatccacactcagaatcaaggatttcagtcttctgattacggaaatatagtagaaaagctcaatgataaagtaatttgcaagttcttcagtacaagggttgaaaacatggctcatgcaggttcagcacttgaaagtagtattagtttacagttgcaagcattagcattgacaccgcatttgcagcagaacattgataccaatactttggaaacaaagattaaaatacaagaacaaaaattcattctccataggaggataaaaaattttgatccagccaaaaaattgaatgtagtgaagctatgtatgtcccaacttgaatggtacaagaaggaaacaaaaaatcagcgaataggatactatgatagctacaagaatatgaactcaccgtgggattatgatgttattcagttccataaaagactcacaaattactgggaaaagatggttgaagaagtagagatgaagcctcagaaagaaggtgcagcttttcgtacccgctggctctatgctgggactaactacaggagaatggttgaaccccttgctgttgctcaatactatagagaagggggtatagactatgtgacccaaaataggtctaaacactttgtaaggttggaggaatggttaaatgaagggacaaaaaaagcaacaagtgatttaagcagtacaagtaagaagaatgtggaagcacttttaacttttgattcttgcttttgggcccatgttgaagaggctctcctttcatgcaaggagttgaaggttgttagagagaaggaagagacattgaagaaattggttatatttgaggagtacgtttatgggttggtcaagaactatgcagtatcaccagagattttcttggcgcaaagcagctacatgtgttggtggaatgagtataaagcaattaagggaactttctataactcagcactctcaaatttcatgagtgatgctaggaagcgtgagcagtatgctttgggagtttatgatttcccttgatgcatgataagttgataaccattttatatataaagcatgtctttcagaagtgtaataaagtaggatttcattgtgaaactaattactcatggatttggatgttttatagttagtaaaattttgtttctatttg

SEQ ID NO: 785 - DNA, 3142 bp, Glycine max
cctttcagtctcactctcactcaacaacaataagatccttttccctctctttcttcataaaacaaacctaaccaaacaatcgaatttcaatttcaatttgatcgctccgataacttccatctatggcggcggcgaaaccccaacgcactccgcaggaagtggaggacatcgtcatccgcaaaatctttctagtctcgatcaccgaaatcgccaccactacggattcgagaatcgtgtatttagaactgaccgcggccgagattctcagcgaggacaaggagctccgcctctcgcgcgattgcatggagagggttttaatcgaccgtctctccggcgaattcgccggagccgtagacgagtctccgttccagtacctcgttggctgttaccaccgagcgcacgaggaaggcaagaaaatcgcgaacatgaaggacaaaaccctacggtcggagatggaggcggtggtgaggcaggccaagaagctctgcgtcaactactgccggattcatttagcaaatcccgagctctttccgagccggggttcggcgaattcgggcggtgccaattcgccgttgctgtcgctgattttggcggaggtaggcggcgggaacgtgttcggcggtggcggcggaggggcaaagagtccgccggggtttctggaggagtttttcagggacccggattttgacagcttggacaagattctaaagggtttgtatgaggagctgagagggagtgtgatgaaggtttctgctcttgggaactttcaggactcattgagggctttgttgtatttggttaggtttcccgttggtgctaagtctcttgtgaatcatgaatggtggattcccaaaggggtttatatgaatggccgtgctattgagatgaccagcattttgggtcccttttttcatatcagtgctcttcctgatcatgcttttttcaagggccagcctgatgttgggcagcagtgtttttctgatgcatcaactaggcggcctgctgatttgttatcttcattttccaccatcaaaactgtcatgaacaacttatatgatggcctagctgaagtactcctcatcctccttaaaagccaagatactcgtgaaagtgtacttgagtatcttgcggaggcgatcaatataaatgcatccagggctcatatacaggttgaccctattacttgtgcaagttcaggcatgtttgtaaatctcagtgctgtcatgcttcgtttatgtgagccatttttagatgcaaatttaacaaaaagggataaaattgatgcaaaatatgtgcactgctcaaaccgcttgaagctaagtgggttgactgctcttcatgcatcatcagaagaagttactgaatggcttaatagtaaaaacccagctacaactggggcaaccaatcaatatagtgatgatcaaaaacgcttgcaacaatcccaagaggccagcagttctggtagtaataattttggtgagctgtcaaatgaaaattctgcacgtgctgaaaagacaaaatattcatttatttgtgaatgcttctttatgaccgcaagagtgctcaacttgggccttttaaaagcattttctgacttcaaacacttagttcaggatatttctcggtgtgaagatgctcttgccacacttaaagccatgcaggagcggacacccacccctcaggcagaattggatataaatcggcttgagaaagaaatggagttgtactcacaggaaaaactttgttatgaggctcagatattgagggataacactcttattcaaaatgcgctttccttgtaccgcttgatgattatttggttggttggcttggtgggtggatttaagatgcctctaccaccaacttgcccaatggaatttgctaccatgcctgaacattttgtggaagatgccatggaacttttaatatttgcttcccggattccaaaggccttagatggagttgtgctggaagaatttatgaactttataattatgttcatggccagccctgaatttatcaaaaacccatatcttagagcaaagatggttgaagtattgaactgctggatgccccgcaggagcggctcaactgctacagccactctatttgaaggccaccaactctctcttgagtatcttgtgaggaatcttctgaaactctacgttgacattgagttcactggttctcacacacagttctatgacaagtttaacatccgccataatattgctgaactccttgaatacctgtggcaagtccctagtcatcgtaatgcttggagacagattgctaaagaggaggaaaagggtgtctatctgaatttcttaaactttctgattaatgatagtatttatcttcttgatgaaagtctgaacaaaattcttgagctaaaagaattggaggctgagatgtcaaatacggtcgagtgggagcgacgaccagttcaagagaggcaggagaggacccggttattccattctcaagaaaatattattcggatagatatgaagttggcaaacgaagatgtcagtatgcttgcatttacttcagagcagattactgctccattcctacttcccgagatggtgatttttctctttccaaccatagcatgttatgcatcttgtcatctcataaaatagtttatcactgaactatgatcttcctttgaaattttgttatgctcctaatgagttcaatcttatttttccacgttttcaaggttgaaagagtggctagcatgctcaattactttctgctgcaattggtgggtcctcaaagaaaatcgcttagtctgaaggatcctgagaaatatgaatttcgtcctaagcatttgctaaaacagattgtgcacatatatgttcatctagctaggggtgacacgaattccatcttcccagctgccatctcaaaggatggccggtcatacaatgatcagttgtttagtgctggggcagatgtccttcacagaattggggaggatgggagaattatacaggaatttattcaacttggtgctaaagctaaagttgctgcttcagaggcaatggatgctgaagctactctaggggagataccagatgaattcctggatccaattcaagtatgttttccgcttttttgtgttcatgtgttttta

SEQ ID NO: 786 - DNA, 1395 bp, Glycine max
atggagcaaccaactagtgtgaaagttcttgaattttgttcattggcaccaccacagaaaacaacaacaaccaatcccaccactccaacatctttgcctctcacattctttgacctactatggttaagaagtcccccagttgagcgtcttttcttctatgaattccccaaccaaaccatttcattctttgacaccattcttccaaatctcaaacactctctttccctaacactccaacactttctccttcttgctggcaccatcacttggccccttgactcaccccaccccatcatcaactatgtccctggcaatgttgtttccctcaccatagctgagtccaacaatgatttcaacgtgctttgttccaatacctgtgatgcttctctacgcaatcccttgataccccacttgaacacttccaatgaagaagcttctgtgatggccctccaacttaccctctttccaaaccatggcttttgtcttggaatctccacacaccatgctgctatggatggaaaagcctcaactttgtttctcaaagcatgggcctatgcttgctccaataatactaacctcacagaacaatcattgtcatcatctttgtcattaccacaacatctcacacccttctatgataggtcaatgataaaagacacaacgggaattggtgcaatgtatctgaacagttggttgaacattggtggaccgaacaataggagcatgaaggtgtgggatcttggaggtgcaaatgcagtgacaaacgaagccattagagggtcgtttgaattaaccccgtctaatatccaaaagcttaagcaacatgcaaaatccaagctcaaagagaataatgctcatgtgtcaacatattctgttacgtgtgcttatgtgttgcaatgtttggtcaaaacagaacaaccaaaggccaatggagtggcctttttgttcagtgtggattgcagggctcgcttggagccaccaattccttccacatattttggaaactgcattattggccgtagggttatggatgagacaatgaagttgttgagagatgatgctttcatcaatgctcttgagggaataaatgaagctatgaaaaagttggaggatggagtgttgaatggggcagtgactttgtctacaatgatgcaaattgcaagggataatagaatacttaccactgctgggtcgccacggtttgaggtttatagtattgattttggatggggaaggcctaagaaggtggatatgacttctataggcaaaacaggagcatttggtgtttctgaaagtaggaatgacacgggaggaattgaggttagtttggtgctgaacaaacaagaaatggaaactttcacggctcattttacccaaggacttgaatccttatga

SEQ ID NO: 787 - DNA, 3844 bp, Glycine max
gataaatttcactctacgtaattcctaaccgccaaaaaagctgcaattgtgaaactatctttcatttcatattgaggaaatgattcatcttctttattgatttgtttctttttaaaggtaatgactaatgagtgcgtcatcttccttgaatgctaagaaatctctccagcaaactaaacgcgttaacatgctttattcccatatatatgaggatagattgtcactcttggtaaatatcaaagcttattagttgttacaataattttagactcctcaacaatttacatacatcagtttcgcgtacaaggtagagaacattgtacccttttgtttccagaacatactgtgttacaaatagcttcaatctttcaaatcattgccttctcgaacaatatacacaacactttgtgtttcttcttcaattcgatctcttctttttactcttattttgaggtatatattcttaccttagttacaaacttgcaaccatgtcaatgcccttgctcacaaacttgcaacacattgagacactcctcaatgcaccaaaccccaccgttagtgcatccattaaaagatggcactctgcattcatggccatctattgttcccgagctattatgtcacactccactctcaagaaaccaaacaaaaccaaagcaaaagcctcaccttcaccaacaccaacaccaacaccatctttcacagttgttgatttgaaccctcaccattcctttgatatagaccaaacagccctcaccgatattgtcaaagaaaaagagcttgagaaccttgatagatttggtggggttgaaggggtggctaaagcccttcaaacccacgttgagtatggtatcaaaggtggtgatgatgatgctgaagacatcacacgtagaagacaagtgtttggttccaacacttaccacaaaccaccttccaaaggcttctttcactttgtggtggaagcctttaaggatgtcactattctaatcctcatggtttgtgctgctctttcccttggctttggaatcaaggagcatggaattaaagaaggttggtacgatggtggaagcatctttgtcgcggtgttcattgttatttccttgtcagcagtgagcaacttcagacagaatagacagtttgacaagctgtctcaagtgagcaatgacatacaaattgatgtggttagaagtgggaggcgccaaaatgtttcaatcttcgaaatcgtagttggcgatgttatttgcttgaagattggagatcaagtgccagcagatgggttgttcatagaaggacattcacttaaagtcgatgaagcaagcatgacaggagagagtgatcatgttgagattagtagacaaaaccacccttttctgttctcaggtaccaaagtggctgatggatatgctaagatgcttgttacttcagttggaatgaacacaacatggggccaaatgatgagttcaataagccaagatattgatgaggaaactcctttgcaagagagattaaacaagctgacatcatccattgggaaggttggtttggctgtggcttttcttgtccttgttgttttgttggttaggtacttcacaggtaacacaaaggatgagactgggatcaaagagttcaatggaagcaggaccaagtttgatgatatcatgaatgctgttgtggggattgttgctgatgcagttacaattgttgttgttgcaatccctgagggtcttcctctggctgtgactctaactctggcttattcaatgaagaaaatgatggctgaccaagcaatggtgagaaagctctctgcatgtgagacaatgggttctgctaccacaatttgtactgataagacaggaactctcacacttaacgagatgaaggtgactaaggtttggcttggcctagaaccggtgctagaaagtgcctacacaaaggttgctccatttgttcttcaattgatccaagaaggagtggctctaaacactactggaagtgtgcacaagtccaataaatcaggttctgaatttgagttttcaggtagtcccacagagaaagcaatcctatcttgggctgtcttggaattgaacatggagatggagaacttgacaagaagttgttccatcattcatgttgagaccttcaactcaaagaagaaaagaagtggagttttgttgagaaggaaggtagacaacacagttaatgcacattggaaaggagcagctgagatggtactaaagatgtgttcaagatactatgatgcttctggcattgtgaaagatcttgacaatgataggatgttgaagtttgagcacattattcaaggtatggcttctagtagtcttcgttgcattgcttttgcacatgtagaagtagctgaggaggagcttgtagatgaagaagggaatgcaatggcgaaagtgaaagaaaatggtttaacattgttggggcttgtgggtattaaggatccatgtcgtcaaggggtgaagaatgccgtggaagcatgccaaaatgctggtgtgaatatcaaaatgatcacaggtgacaatgttttcactgcaaaggccatagcaaccgaatgcggcatacttcggcctaatcaagacacagatggagcagtgattgaaggagaggaattccgcaactacacgcatgaagagaggttggagaaggtggaaaaaatctgtgtgatggcaagatcttctccttttgacaaacttctaatggttcaatgcctaaaacaaaaaggccatgtagttgctgtcactggggatggaacaaacgatgcaccggctctcaaagaagctgatattggactctctatgggaattcaaggtactgaagtggcgaaagagagctcagatattgttatattggatgacaattttgcatctgtggtcactgtcttaaggtggggaaggtgtgtttacaacaacatccagaagttcattcagtttcaattgacagtgaatgtggcagcacttgcaatcaactttgtggcagcagtgtcagctgggaaagtgccactaacagcagtgcaattattatgggtgaacttgatcatggacacattaggtgctttggctcttgcaacagaaaaacctacaatggaattgatgcacaaaccaccagtgggtagaacaaaacctctcatcaccaatgtcatgtggaggaacctattggctcaagctttgtaccaaatagcaattttgctgacccttcaatttaaaggtgagtctatctttggtgtgacatcaggagtaaatgacacattgattttcaacacatttgttctttgtcaagtgttcaatgaattcaatgcaaggaagatggagaagaggaatgtcttcaaaggcatacacaggagcaagttgtttttaggcattattggcataacaataatccttcaggtggtgatggttgagtttctcaagaaatttgctgacacagagaggctaaattggggacaatggggtatctgcattggtttagccgcagtttcctggccaattggttgggttgtgaagttaatacctgtcccagataaaccattcctcagttttttgagtaagaagaaatgaagacatagccatgtatgagtggtgtcttgtttgatccattcaatctctcattaatcatttagaattctgttgggagatattgtaaagaaagattgctagagtcaaatcatcgtgtagacacgatgtgatcattcttatttgtatgatatatattcttttctaatatggccattgtattagacattctttaagttttatttttttatcatatttattgtaactatatgtttcaatataacagaatgagaattgctttattaatataa

SEQ ID NO: 788 - DNA, 537 bp, Glycine max
atggcttcctcaatgatctcttccccagctgttaccactgtcaaccgtgccggtgccggcatggttgctccattcactggcctcaagtccatggctggcttccccaccagaaagaccaacaatgacattacctccattgctagcaacggtggaagagtgcaatgcatgcaggtgtggccaccagttggcaagaagaagtttgagactctttcctacctgccagaccttgatgatgcacaattggcaaaggaagtagaataccttcttaggaagggatggattccttgcttggaattcgagttggagcacggtttcgtgtaccgtgagcacaacaggtcaccaggatactacgatggacgctactggaccatgtggaagctgcctatgtttggttgcactgatgcttctcaggtgttgaaggagcttcaagaggctaagactgcataccccaacggcttcatccgtatcatcggattcgacaacgttcgccaagtgcagtgcatcagcttcatcgcctacaagcccccaggcttctaa

SEQ ID NO: 789 - DNA, 537 bp, Glycine max
atggcttcctcaatgatctcttccccagctgttaccactgtcaaccgtgccggtgccggcatggttgctccattcactggcctcaagtccatggctggcttccccaccaggaagaccaacaatgacattacctccattgctagcaacggtggaagagtgcaatgcatgcaggtgtggccaccagttggcaagaagaagtttgagactctttcctacctgccagaccttgatgatgcacaattggcaaaggaagtagaataccttcttaggaagggatggattccttgcttggaattcgagttggagcacggtttcgtgtaccgtgagcacaacaggtcaccaggatactacgatggacgctactggaccatgtggaagctgcctatgtttggttgcactgatgcttctcaggtgttgaaggagcttcaagaggctaagactgcataccccaacggcttcatccgtatcatcggattcgacaacgttcgccaagtgcagtgcatcagcttcatcgcctacaagcccccaggcttctaa

SEQ ID NO: 790 - DNA, 1318 bp, Glycine max
gataattctgattttgcttcttttattgttgatgcaacaatgagcgtcccaaaaaagagaagctccaattccaaagaatttgatttttatgaatcggatgattgttatgcacccccagcaaaggagcaccgtgtagtatggtcagaagaactgcatcaagaatttgtcaatgctgtgatgcaaattgggcttgataaggcagagccaaagaggattcttgaagtgattaatatccctggtttgacaaaagagaatgttgctagtcatttgcagattgatcgcttggggcagactataaaaccttgtggtacagttgagaaggggcaaaagttttctttccctatcagaagtaatggtggtgagcttgaactttgttaccagagtcaacttaatcagagaagtagagtcaacctaatcagagattggagtttcataggaggatcaagaattgttgttaaaccaaatttcgtgagattggttccttttcgaaaagccagtcgtgtctatgcttcatggttgtcaggatcacaacttgctagcagcgcctttacactgggaacaacagcagtgctaccattttacacactcatggttctagctccaaattctgagctaactaggaagtctatggaaagtagtgtaccatatgtagtgcttggcattctatatgcatatttgttgtaccactcttggacccctgagacagttggacttatttttgcaagtaaatacttgctaccagagctgactagtatagggaaaatgttctccagtgagatgactttagcatcagcttggattcaccttttggttatggatctctttgctgcaaggcatgtttttcttgatggattagagaatcagatagagactcggcattcagtttctctgtgcttgttcttttgccctattggggttcttagtcatgccatcaccaaagaaatgactaaaagtgccagaaaaaacaagcacagcttatagagggcacctacttgctttcccacataaccaaaaaagaaatttaattgaagtttaagagtttcagaaattcatgttcaagtttttaaattaagttacttgtaattttgtttggaattgttttcccctcaatcaaaatactattagtattttgttccatctcaagtgtataaattattttgacttgatgttcattacatttttacttcaattgcaaagaaagctttccattttcatccaaccttcttgacaatgaaacatgttttgtcaagttgctgcaccaggatcctcaggggcattatatttgtctagaggttatactaaacatgagaagttgata

SEQ ID NO: 791 - DNA, 1212 bp, Glycine max
taagtgggctgtttggaatagtgatgggccaattcggcacccaaaactaaaagcctatagccgactaactccacttccctgaaaacttgtgttggtgcccttctcgctgcactgcttcttcgttcttctctctggcgaccaaactcgaagaatccaaacagcaggtttgttgtggaagatgagtggtgttgttagggctgcattgagatccaccactagtgtttgtgcacttgtgcagagaagccatggcctcctcccattgaggtgcttctccactgaggcagaacagccacctttgaattcaacaccccctcctcctccgttctttgagactgaccattcaggtttgacatatggtaatctgcttggtgttcgtaaatatgcgctgaaaactgatatcatcaactttcttgaagggtgtaatttgactctggaggatgttaaaatggattatgaccgtagcttttccccagtttcaacgttgttgcaattccctactcgtgattcctttgaccatgctgtaaaagtgattttaaagaagggtcgcttgtacaaattggacagggttaatcttcaccaatgggaccaagtaaaaccatatgacggaaaaactattttaattcaaggaatgcctcgagcaggtacatatgaagatataggacgcatcctctccggttttgaatttgattcctcctccattagcttgtttttaaggcccggaggtacggcaggtgcggatcccattaaactggccacagtacgtttcaattcaaggactcaagcaatgaatgcatacattgcaaaaaatggaacgttttgccaaaacaatcgcatttggatacaagttatccagtaatacacgcgccccttactggcgctagtgttatagtactgctttaatagagtgcagagtagtttaagttgcttttttcttggtaattttggatttcataatgtcttcggtttaaagggatgcaaggaaatggctaccttgaataaaaacacttgatagttgattggtagttgatgaagagtttggtttttcttcgtattgaaatgtgtttttatattaacgatgaagtcaaggttttttaaatgactttgaaaacgtgttgttgattatatgataatttgagtttagaaattccatatatcgatgtatctaggtatatgaaagatgctacttttcaatatatatccgtgatttcatgt

SEQ ID NO: 792 - DNA, 786 bp, Glycine max
atgtatatatgcagctactcaaccattgcatgggtggcttccgtggacaagcgagttcataatcacatagatgtggcggttgagtatgggtacaaagccagtacttcagcaggaacggttttcaattttctcaatgccttaggagatgttgcttttgcctacgctggacacaatgtggtgttggagattcaagcaaccatcccttcctccccagagaagccatcaaagggtcctatgtggaggggggtgctaatagcatatttagttgtgggcttgtgctacttccctgttgctcttgttggctattgggtgtttggcaattctgttgatgacaacatcctcatcaccctaaacaaacccacttggcttatagtaactgccaacatgtttgttgtcatccatgtcataggaagctaccagctatatgcaatgcctgtttttgacatgattgagaccgtgatggttaaaaaattgcatttcgagccaagttggctgctacgatttgtcgtgcgcaatgtttatgttgcatttacaatgtttgtgggcattacgttccctttctttggtgccctcctcggattttttggaggatttgcatttgctccaacaacatactttctcccctgtattatgtggcttgctatttacaaacctaggaagttcagcttatcttggatcaccaattggatctgcattgtacttggtctcctactcatgattttatcaccaattggtggattaaggagtatcatactcaatgccaaaacctacgggttttaccaatga

SEQ ID NO: 793 - DNA, 1224 bp, Glycine max
ccaattcaagtttcaggaccaagcaagacaccctgcgaattctgaaaggattttcgagttcagagttcagaactcagaagttgggtttttcttccgcttcgctatctatgacacaatttgaattcattgcttctcatatgattgtgtttatttgagaagttaggcgtttcctggatgctggcagttatgaaggagctattttgattgaatctgaattataaattcatcaccaatgggttacagatgcattcagtgtgggtgtcctgtcaaaacactttacgtgcagtattctccaggcaacattcgcttgatgaaatgtgagaattgcaaggctgtggcagacgaatacattgaatgtgaaatcatgattcttgcgatagatttgatacttcacaagcccaaggcctatagacatctccttcacaatgtcatcaatcaagaaacaatgaagttccagggactactctggaaattggctgtcattttccttttttttgaatattacagatgtttgatcttggaaagcagcaagggaaaattggattcatcaatgagtgtctctccatcagtatcaatatgctggaaggtgctgatggatgttttatttgggaacttgatgtttcttttaactttcttctttatggttatgatgcttttccatgtatcaatcaccatcaccaggtgcattgaccttttgcttgcactcatgatttcaagttacttcaagattttttttattgccatgatggtctgggagtttccatcttctgtgatcttcatcattgaattgttttgtttatcatctaatgctgcaacattgaaagtgatgactgattcaactatgagtcgttgtgtttggacctgcttcagtgcatatgctataaaatttattatcacttggatactggagctattgccggggcaattaatgcaaggctggagtcaaatgccattcacattctataaaccagcatgatttagttttgcattcttatgctaatgtattagtagccgaatttcttggcaagtgtttctgagctgtatatatatccttgacacttttttttcttaaatttaatttgaagctcaaacatttcctagggttctccagaacgttattatgatgcttcttaaatttagtcatttgcactgcctaatgatcgttcattttgctgccattttgtatacaaagggggtacatttagcctgatcaaacacagtatt

SEQ ID NO: 794 - DNA, 1210 bp, Glycine max
ttcatttcaggtatctttttccaaatctattaacaaagtgaagagtaatcagtaggggagaaaaaacatggggtcagaaaccgaattgaagcttccaattattgacttctccattgagtacttggagtccaattctgatcagtgggaatcagtgaaatcccaagttcacaaggcccttgtagagtatggttgctttgaggctgtgtttgataaagtccctttggaccttcgaaaagccatttttcttgaagtggaagagctgtttgatctccctttacaaaccaaacaacgagttgtgtctagtaaaccataccatggttatgttgggcctcttcaactctatgagagcatgggaattgatgatgtagatgttcatgacaaagtggaaagtttaatcaagatcttatggccacaaggaaaaccaggttttagcaaaaatctacaatccttcacagagcaagtgacaaggttggatcagattattaggaagatgattttagagagtttaggtattgaaaaatatatggacgagcacatgaactcaacaaattaccttgcacggcttatgaagtaccaaggccctcaaactaatgaagcaaaagttggcataagagagcacacggataagaacatattgaccacattgtgtcaaaatcaaattgatggtttagaggtacagaccaaaagtggagagtggatcaaatgcaagccctcaacaccaaatagtttcgttgttgtcaccggggacacactttatgcatggacaaatgggagggtgcatacgccggctcatcgagtgatgatgagtggaaatgagacaaggttctctattggattgtttacagttccaaaaccagggttcataataaaggctccagatgagcttgtgacagaggagcaccctttgcttttcaagccctttgtccagagtgagttcatgaagtttcttcgctcttctgagagtaccaaaaatgccctgaaggtttattgtggagtctgagattttattcagatgacactagtgctccctctacacaatcccttttggatttttcataaaagtgtgtaatatttgaataaagtttgcaatatggtgtgagtatgtatgaacctttcttctccaattcatatggacagagattgtgagttttgtattgttcaaactcaggaagagagtttgttttagagtaaggttaaattaaaagtaaga

SEQ ID NO: 795 - DNA, 945 bp, Glycine max
atggggtcagaaagagagtgtcaacttcctctacctgttgttgatttctgtgatgaaaacctcaaacctggtactgacacatgggtttccgcttgtgatgttgtgaggggtgcattagaggatcacggtggatttctagcactctacaacaaggttgatccactgctctatgactctgtcttctctgcaatggaacaactctttgatcttccattagaaaccaaaatgcaacacaccactgataaacctatctatagctatgcagggcaacgccctgatattcctttgtatgaatccatggccatcgccaatccgttgaatgataaagattgtcacgagtacacaaatattatgtggccacaagggaatgaccaattcagtgaaagtgtgaattcctatgcaaagaaagtggtggaactggattatcttgttaagagaatggtgtttgagagctatgaattggacaataagaaatttgagtctttgcttgaatcaaccgattatattcttagatgctacaaatacagaacatctaaggggggtgagaccaacttaggagtgcatccacatacagattctggcttcctaactatattgaatcagaagttaaatggcttagaaattcaattgaaagatggagagtggttcaaggttgatgcctcacccaacatgtttgctgtcttggctggtgatgcattcatggtatggagtaatgacagaatacggggttgtgtacaccaagtattcatgaattcaaaggtagacagatactgtttggggctactttcatatgctggtaaggtgatggaaccagaggaagaattagtggatgaggaacatcctcttcgttataaaccatttgaccattatggatatcttcgtttcttcctcacagaagaagctgtaaaatctgcttctaggatcaaggcatactgcggtatttga

SEQ ID NO: 796 - DNA, 1559 bp, Glycine max
gtctcttttatagatatacttcgtcctcttttcctctctactaggtaaggtcgatcgagattgatacttaccaatattttccaaatattaaatgagatgtacatagctttatgagtcctaataaattttaacaaccgtttatgtaggaaaaaaatgattttagcattttccgtaccataatttatggcggaaaagagtggtgtccaacattgatttcgtttctataaataccgaacatgccataccaacctagcattgcacagacttacctaccttacctctgttactacaactcttcaatggcttctagctttcaaagttcaccaatggcttccaactacagaagccataataagaaaagccacgacaatgacatgttccatccaacccaagtggtggtggttgtggtgcctttcccagcacaagggcacctcaaccagcttctcaacctctctcgcctcatcttggcctccacgagtctccgagtccccgtgtatgcactcttgcaatccctttcatctgtagccagaagggtcgttgtcatctatgactccctcatggcatctgtggtgcaagatgctattcatgtgcccaattgtgagagttacactttccacagtgtttctgccttcactatgttcctgtacttttgggatgcaatggggagacccccagtagaaaaagtgtcccacgtcatccctgaagttccttcccttgaagggtgcttcacaacccgatgcatagatttcatcacttcacagtatgagttccacaagttcagcaaagggactatatacaacaccacaagggtaattgagagtccttacttggagttaataaagaggatcattagtagcaagactcattgggccttggggcccttcaaccctttgtccattgagaagggagtctataacacaaagcacttcagtgttgagtggcttgacaagcaagaagcaggatcagttttgtatgtgtcgtttgggacaacaacatgcttctctgaggagcaaatcaaggaggttgcaaatgggttggaaaaaagcaagcaaaagttcatatgggtggtgagggatgctgacaagggagatgtgttcattgaggatggtgtgagaacttctgagcttccaaaggggtttgaagagagagtgaaaggcacggggttggttgtgagagactgggcaccccaattggagattctaagccacagttcaactggtgggtttatgagtcactgtggatggaactcttgcatggagagcatcacaatgggggtgccaatagcagcatggcctatgcactctgaccagccgaggaacagggttttggtgaccgaagtgctcaagattggggtggttgtgaaggactgggaccacagggatgagttggtgacagcatcagatgttgagaatgccgtgaggagattgatagcaacaaaagaaggtgatgagatgagacaaagggcaatgaacctaaaaaatgctattcgcaggtccagggatgaagggggtgtttctcgcgtggaactggatgatttcattgcgcacatcactagatag

SEQ ID NO: 797 - DNA, 3130 bp, Glycine max
tttaattgaaatattggggcctaatgctaaatttttagggttttataatccacattcttcgggttcgggcaagaagagagagaagacgcaattttgaccctcaatttcacagacctttaatcattcacgcgattcttcttgttcaatattccccgttcatttgttgcagaaatctggttttggggcaatctccgtatttcgatattctggtgattatggaagcagattatggaaaggattgcaccaaatctgagaatagagaaaatctttcagttccccctggttttacgtccctgacatctttcattttgaaaagggatggaaatgttaagaaaagtgataaatctacagcctttcaaattgcatccgaacaagagccaatattcatggagactattcctgagatgaatgacattagtgcttatagacaggttcttatgcatcggccgtggataatcgcagaccagagcaatcaccacaaacttgaggaatctcacataaagcatcttcctatggatccccctttaaatgatggtcgtccaaaagggatcatacatggatgtccaaactgcagtaattgtgtgaaggtaacagcaaggtggcatcctgaggatgctataagagaagttttggaagaagctcctactttccacccaacagaagaggaattcaaagacacacttaaatatattgcaagcatacgttccagagcagaaccttatggaatgtgccgtattgtccctcctacttgctggaaaccaccatgctctcttgagaaaaagaacatatgggaaaagtctgaatttgttgctcagattcagcgaattgatggacaccaacttcagcatgcacaagaaattatggctagtgctagtggaaatacaaaaaccaagagaaaaagagatgtaaaagtagctttagactctcagcttggtaatagaaacaccagcactccaaataaccagaatgttcaaaaatgtgactgtgagtctgaacctggtcctaaattcagtctcaaaacattaaagaaatatgcagacatatttaagagtcagtactttgattacaaggataagaagaagattataggttccaatataaaattagctatacatcagcagtgggaaccatctgtggagaatattgaaggtgaatatggacggattgttcaaaatccaactgaagaaatcaaggtgctttgtgttaacactttggaggccggagtttttagcagtggatttccgacagtttctgatcctgtggaggcatacacttaccctgaatatttgaaatctggatggaacttgaataatatactttcactctcaggatcccttctttgttttgaaagctctgaagcttcacgtaattttgcccccaagattcacatgggaatgtgcttctctccactcaactggaaagttgaagagcaccacttatactcattatattacgtgcatttgggtgaaccaaaagtgtggtatggcatcccaggaaaatttgctattaactttgaaacaatttggaagaagtatctccctgatttgcaagcaggacagcctgatatgcatgataatatggtgatgcagctatcatgctccatattgaaggcagagggcattcctgtatatcgttgtattcagtatcctcgtgagtttgttcttgtctttcccgggtcatatcattcaggatttgattgtggcttcaactgttctgaagcagtaagttttgctcctcttgagtggctgcttcagggacagaatgttgtagagctatactgtgaacagaggagaaagacattactttcatatgataagcttttgctaggagcagcaagggaagctgtgagggtccaatgggaaactaatctgtgcaggaagagcacatcagatagcttaacatataaagatgcctataaaaaaaatgggttcttaataaaagctttgaactctcgcatccagagtgaaagtttgaagagaaaatttctttgcacttctttggtatcacaaagaatggatgaaaattttgatgccacttgtaaaagggaatgtagtatttgcctccgtgatttacacttgtctgctgtaggttgttcatgttcagataactttgcatgtcttgatcatgcaaaacagctttgttcttgcacttggagcaacaaaactctcttctaccgttatgaaatcaataatttgaatgttctttgtcaagctttggatgggaaattaagtgcagtctttaaatgggctaaagaggatctcggattaactctgaactctgttgcctccaagagatcaaaacaaagctcaaaaaacataattggttcaacccacccttcgcaagatttgcagatgaatgaacctgtatcgcagacagcatcagatgaatcctcaaaagggaaacaacgtcaattgctagatatattgaattcatcaaaaacaaaagaaaatgaagtggttccgaattcatcaaagaaaaaaaatgaggtggttccgaattcatcaaagaaacaaaatgcagtcgtttcccaagttgtgcggacttttggtggcactcacagtagttcttatgacattcgttcaaaaatgaagacaactgtacttcagtcaacctttgcagatgataagaaaggaatcaattctgttggtgccaaaattgatacgaagacacttgggcataagtttacaatttcaaaggaagtaggagatccaaaagtatctaaagttccttcagttacaaacgcacgttacttgccttttctacaagacaatgtgttagctgatgtttcatctgatagttcgagcacatctatgtcgtcagattctgaagatgaagatgtgcaagtagctaatggctaaattttcatagcggaaagatgttaagagtcttttgtaggtttatgtgtaggataaccattttttcatgcaaagattggcactggaaatttggatgatacatccatcgtagtaggtagttatatagttacaaaaaggttggtctgtaacccaattttcttcaacagttgataagaacccaacactattttggcaagtagacagaacagcaaatccattggttcattttgtatcccgagtttttctaatgtcattcttgtctctttctctcctat

SEQ ID NO: 798 - DNA, 3520 bp, Glycine max
aagatcacagcctactcataaacactccacctccttccaccttcttccatctctctcttttatttttttatttttattaattcatgtaaattaggattagggtttatctcaaatcgccctctacaattttaaatccgaacttctcttcgattcattccccctccccaataaaaccggcgcgagaaccaataaaggttaggattagggttttaaattcgtttgcatttgattcgaatgaacatggagagatcgttggacagatcgagagaacctggtcccaagaagcctcgattgatcgaggaactcaacgcccgacagttacctcaacgccctacggcagttactacgttgccgtctacgaggtttcgagcatatggcagagactccgaaatcagcgatttgggtcgtggcggtggcggcgggtaccagccgcagcctccgccgcaccaagagcttgtgactcagtacaagactgcgcttgctgagctcactttcaattcgaagccgataattaccaacttgactattattgccggagagaacctttctgctgccaaggcaattgctgctgctgtttatgataatattctagaggtattctgcaaggcttacaaacaggttgatccttgtgttcattcaagtatgcaacatctttttggaacttggaaaggagtctttcctcctcagtcccttcagatgattgagaaggaacttggctttgcacctgcagtcaatagttcagcttcagtatctgctacagtcagaagtgatttgcagtcacaacgcccacctcatagtatccatgtgaatcccaagtatttagaaaggcagcgtcttcagcagtcaagtaggagtaaaggggtagttaatgatatgactggagctgttttaaactcaaatgaggattcggagaggccagatagagctttgagtgctgcacgaccatggctggatcctaggattaacatgcttaataatcagcacacacatagagatgtatttaatgattctgttcctgaaaagagcatggatgggtcatcatacggaggcagtgaatatagttctgtcatttcaagtaatttggtctcaggggctggaagaactggaagtaagctcattgatttaggacatgacaaaacatggttcaaaacagatggtggtgatccagatactacatctgggcaaagaaatggtttcaatctcaagcgtagttattcaaatcgtgaagcaccaaagctcacgaatttggatgcacatcgtcagccaagacaaagcacaactgacatacggaacaatttgatgtcaggtaactggaaaacttctgaagaagaggagttcatgtggggtgagatgaacattggtttgactgatcatggagccaatgtatcaagcaatttgagcacagacacatggatggcagatgatgagaatttggaaggtgaagatcacctccaaatcacacgcccttttggagcaaaggtcgatagagaaatatccactgctaagaaacaaccacctggttttgggggtcatccaccgtcatcctggcaattgcagaagcaccactcaattgataagttgaatctaaagccaggttactcagaaggatttgtgtcaactcttagtggattaccagccaacccaagttctttggctgtcaagaaggggaaccaatcctttacatcgaatgcagtagtaggaatggccaaatttgtgggacaacaatttgattctggggaaactgaatccccttctgggcagtcacctttgcggcaacagtctccatcactgccaggagcagtacaccatactcattcaatgcaaaattttgctgaccaagaattgccccagaatctcaaaacctctcgatttttgggaggtccgataagtcagcatattagagatcgctcacctaccggtcatccaattgttcaggttggtaacttgcgaagatcacaggaaagggacatgcacggcccattatcttccatgacttcttttcgaccaaagcttcagcaaaagcagctgaacccatctcagactgaagttactgctaaaactaagctgccccagtctaaagtttctttaaccagagaaacttcagaacagttgagcacaaataatttgtcagctgtacctgtcaagagtggaatcatccccaagaaatcaatttccagtaatctggattcaagggaggatccatctcagactggggttcaacctactcagtctggcaggcctaccacattaatttcttcagggtctgctgtggcatcaccatcttcattagatcctctgcataatgattcatctactctgccaaaaaaacctcaaggaaaggctggacaaccaccacaaaggctttctactcaaccacctgcttcctctagtgttagcagttcctcagctccaaccttaaatgctgccaaaaataataaattaaatccaattgcaaaccttttaagctcattggttgcaaagggcttgatatctgcagaaacagaatcaccaactacggtaccaagtgaagcgccgaagggatccaaagatcaaactgaaataattaccaccagttgttctttaccagttacatcaatttctggttctgcagctatcccagtatcatcttccggagataaggtagatgctgctacaaaaatctctcatgcctcacctcaatcaactagcacggaaatcagaaatctcatcggctttgattttagacctaatgtaattcgagaattccacccatcagtaattagggaattatgggatgatttccctcataattgcaaagtttgtggtattaagcttaaacaagaactgtttaatagacacttggagtggcatgccgcaagagaacatggtccaattaaggcatcaagaagttggtatgctaagtcaattgattggattgctggcaggacagaatattcatctgagtccgagtttactgactctgttgatttacaagacaaaaaaatagacagcagtcaattggatacgatggttctagcagatgaaaaccagtgtctgtgtgtattgtgtggcgagctatttgaagatgtgtgctgtcatgacaggaacgagtggatgttcaaaggggccgtttacatgaacttttcagatgtcaattgtgagatggaaagtagaaatgtgggtcccatcattcatgccaaatgcttatcagagaactcagtgatcaccaattcggataatgattaatggtttgcttctatagcatttgagctatggcgtagtcagaagcttaccaagggtaacccacccagtttcacattgcataataaattttgatggtcttttatacttaaaatttattgcctctaactggttcttagagcggtcaaacaaattttgtgcttttatttttcttgtacccaaaaaaagaattgcgtagtggtcaaaatatgtaaatgcgagataagtttttgcagctaaacttggtcgttgatgtggttgtgttaactttatttcaactatggagaggcggattttctgc

SEQ ID NO: 799 - DNA, 1352 bp, Glycine max
tatatatatatacatccacatactacacaagcaatttgcaaaacacatacacaagctagttatctgataattacaataatgggttccctccctcacgtagtagaggattgcatgggcttcctccaactctatagcgacggttccattttccgttccaacggcatagaattcaaagtttcacccattcaagacaactccataacctataaggattatctctttgacaaaagattcaacctttctcttcgcttctacaagccccaacaacaacacatagcactcagcaataagaaggtccctattgtgattttccttcacggtggaggcttttgcttcggttcgcgcacctggccccatattcacaactgttgcatgcgcctcgcgtcggggctccaagcggcggtggtttcgccggactaccgtctcgcgccggagcaccgtcttcctgctgcggtggacgacgccgtggaggcggtgaggtggctccagaggcagggcctgagcttgagggaggacgcgtggttgagtgggggcgttgactttgaccgcgtcttcgtcgtgggtgactcgtctggcgggaacattgcgcaccacctggcagttcggttggggtccggttcgagagagatggacccggttcgggtacgaggttacgtcttgtttgcgccgttttttggcggggaggttcggaccaagtccgaggaaggtccaccagagcacatgttgagccttgagttactagacagattttggaggctttcgatgcctgttggaaagagccgagaccacccattggcgaatccgttcggacctggaagcccaaatcttgaacaagagaagcttgatcctattttggtgatagtaggtggcaatgaattgctcaaggatagggcaaaaaattatgctacaaggttaaaagaattagacaaggacattaaatacgttgagtttgaggggtgcgagcatgggtttttcacgcatgattcattctcatcagaagttgcagaagaggtcatccaaatccttaaacgattcatgcttgcaaacttctagttagaaggcacgcacgcacctgaaaaaacaaattcaacagtagaaagacactcatagtgaaatgtaattaaggttaattaattagtctgtgtaattttagcccggtataagtagttcgtgggaatttataagtatatataaatgtcaatttcatggtgtgtacgtgtagcttttcattggagattgtagtcaagtatctttcttagctatttgtgctataacttttgaattgtatcagtaatttctcaagcgaaaaattcataataatagaattttaataagaattctatatttttatt

SEQ ID NO: 800 - DNA, 1956 bp, Glycine max
aatcttcaagctacattaataactcttaattgttcattctttcatccaaaataccaatttctatggctttcaatagcttgtactttcgtatactctgtgtttcccttgtgctatccttcttgacatccatttccatagctgataataaccatgaagccgttccaccagaaaccatatgctactcaaccttagacccttcttactgcaaatctgtgcttgctaatcaaaatggcagcatatatgactattgccgcatttctgttcgaaagtcattgtctcagtctcgtaagttcttgaacaacatgtattcatatcttcaacatccttcttcttattctcaacccacaattcgtgctcttgaggattgtcaattccttgctgaattaaactttgaatacttatcaacaacacgtggcactgttgataaagccagcgatgttcttcccacctctcaagccagcgatgttcacacattgcttagtgctgttttgacaaatcaacaaacttgtttagatggccttcaaacttcagcttcagattcaagagtgaagaatgatctttcttcccaactctcggaaaatgcaaagcttgacagtgtctcgctttatttgttcaccaaggcctgggattctgagaacaaaacttcaacatcatggcagcaccagaatgaacgtttacccttgaagatgccaaacaaagtacgtgccatttatgattccgcgagaggccaggggaaaaaactacttcaaacaatggatgataatgaaagcgtacttgtgagtgatattgtggtggttagtaaggatggaagcgggaactttatcactatcaatgatgccatagctgctgcaccaaataacacagctgccaccgatggctacttcattatttttatcgccgagggtgtatatcaagagtacgtatctatagccaaaagcaagaagttcttgatgctaattggagatggaatcaatcggacaatcatcactggcgatcacaacgttgttgatggctttacaacatttaactcagccacattcgctgtggtagcacaaggatttgtggcaatgaacataacattccgcaacacagctgggccaagcaagcaccaagcagttgcagtaagaaatggagcggatatgtccaccttctacagctgtagctttgaagggtatcaagacacactatacacgcattctctgaggcagttttatcgcgaatgtgacatatatggcacagttgacttcatatttggaaatgcagctgttgttttacaaaactgcaacatgtatccccgcctccccatgagtggacaattcaatgccatcactgcacaaggtcgaactgatccaaatcaaaacactggcatttccatacaaaatgcgaccataaaagcagcacaggatctggctcccgtggttggtactgtggaaacattccttgggaggccatagaaggagtactcaaggactgtttatatgcagtctttcatggatagtttgatagctccggctggttggcatgaatggaatgggaatttttcactgagcaccttgtactacgcagagtatgataacacaggtcctggttcaaacactgccaaccgagtcaactggcctggctatcatgttattgatgctactgatgcagctaattttactgtctctaacttcttggttgggaatgattgggtgcctcagactagcgttccatatcagacatcattgtaataataagtcactttacttggattggaatgcctgtcatagagtatgtttaatgtgttgttccatatcatctagctacaataagtgataaatgtggaggatctgataaaagaaggagtgaatttgtcaaatcttttaacacgaataaattgttaatcgcacaatttttttatcagttgttagtttttgttactgaaaaatattgaaattcacaccctctcccttcctt

SEQ ID NO: 801 - DNA, 1848 bp, Glycine max
atgccagcaaccaaccaccctatttatccacttcagacttcacactcaaccaaatcacagtatcacttaccgtcttcttcttcttcttcttcttcttcttcttcttcttcttcttcttcttcttcttcttctatatatatatatatatataccatgtatagccccattagcagaaaaaaaccaccaatggagtctcacgtagacaccattctctctgcaatttttgttctactcctttcttcgttaacccatttcagcatcaccgcaaatgcaacaagaacaccccaagaaaacagcctccatttccaagtagcaaactccacatgcgagggaacactctactccgacctctgtgtctcaacccttgcctcattcccagatctcacctcaaaaaccctcccacaaatgatacgctctgtcgtgaaccacacaatatacgaggtcacattgtcggcctccaactgcagcggcctccgaaggaacctcccgaaactcgacaaactcgaacagagagccctcgacgactgtctcaatctcttcgacgacaccgtttcggagctcgaaaccaccatcgcggatctctcacagagcacaataggaccgaagcgttaccacgacgcacagactttgttgagtggcgcaatgaccaacttgtacacgtgtcttgatggctttgcgtacagtaaagggcacgtgagggacaggtttgaggaggggctgttggagatttcgcatcacgttagtaactcgctcgccatgctgaagaaattgccagcaggagtgaagaaattggcgtccaagaatgaggttttccctggatatggtaagatcaaagacggctttccaacgtggctatcaaccaaggatagaaaattgcttcaggctgctgtgaatgaaacaaacttcaatcttcttgtggccaaagatggcactggcaacttcaccaccattgccgaagcagtggctgtggctcccaactccagcgcaactagatttgtgatacacataaaagccggggcatacttcgagaatgtggaggtaatcaggaagaagaccaatctgatgttcgtcggagatgggattggaaagactgttgtgaaggccagtaggaatgttgtggatggctggaccactttccaatcagccactgttgctgtggttggagacggattcatagcaaagggtataacctttgaaaattctgctgggccaagcaaacaccaagccgtggccctaaggagtggttctgatttctcagccttctataaatgcagcttcgttgcctaccaagatactctctatgtccactccctgcgccaattctaccgcgattgtgacgtttatggcacagtcgacttcatcttcggcaatgcagcaacagtgctccagaactgcaacttgtacgcacgcaagcccaatgaaaaccaaaggaacttgttcactgcacaaggaagagaagaccctaaccaaaacaccggcatttccatcttgaactgcaaggttgcagcagctgctgatttaatcccggtcaaatctcagttcaagaactacttgggtcgtccttggaagaagtattcgagaactgtttatcttaattcttacatggaggatctgatagaccccaaagggtggttggagtggaatggcacgtttgcattggatacgttgtattatggagagtacaacaataggggtcccggttcaaacacaagtgcaagagttacgtggcctggttatagggttatcaagaacgccactgaggcaaaccagttcacagttcgcaatttcattcaagggaatgaatggttgagttccaccgacattccattcttctctgatttcagttga

SEQ ID NO: 802 - DNA, 666 bp, Glycine max
atgccccccttattttgcagctacaaaagggctctccctctctggtttttttcactcaccaaaaagacgaaagaagcaagcatgtgtggcggagcaatcatcgcagatttcatacctcggcagcgtccccgcaccctcacagcctccgaactctggcccaagcgcagcgaacctcaacctcaacctcctcctcctccagttaagaggcagaggaaaaacctctacagagggatcaggcagcggccctggggcaaatgggccgcggagattcgcgatccacgtaaaggagttcgtgtctggcttggcaccttcaacaccgccgaagaagccgccagagcctacgacaaagaagcccgaaaaatccgcggcaagaaagccaaagtcaatttccccaacgaggacgaccctctgccgcaatacggatcttgcaagagcctcaacttggagttcggttacgatctcaaccaaacagggcttttcccttcttctaacgctgatgagaattgcgggtcccacgtggcttactccgttacggaagccaacaacaaagtagagaagctttccgaggagcttatggcgtacgagaatttaatgaggttttatcagattccggaaaacgtcgttggggatttgtgggcctttcctgacacctctccacctctctga

SEQ ID NO: 803 - DNA, 984 bp, Glycine max
atgccccccttattttgcagctacaaaagggctctccctctctggtttttttcactcaccaaaaagacgaaagaagcaagcatgtgtggcggagcaatcatcgcagatttcatacctcggcagcgtccccgcaccctcacagcctccgaactctggcccaagcgcagcgaacctcaacctcaacctcctcctcctccagttaagaggcagaggaaaaacctctacagagggatcaggcagcggccctggggcaaatgggccgcggagattcgcgatccacgtaaaggagttcgtgtctggcttggcaccttcaacaccgccgaagaagccgccagagcctacgacaaagaagcccgaaaaatccgcggcaagaaagccaaagtcaatttccccaacgaggacgaccctctgccgcaatacggatcttgcaagagcctcaacttggagttcggttacgatctcaaccaaacagggcttttcccttcttctaacgctgatgagaattgcgggtcccacgtggcttactccgttacggaagccaacaacaaagtagagaagctttccgaggagcttatggcgtacgagaatttaatgaggttttatcagattccggaaaacgtcgttggggatttgtgggcctttcctgacacctctccacctctctgatttctgtcacatcgtttcttctatcattaattctccaattctgttcttaaaatatgatatgtacaatcagcaatttcaatttgcatgtatttaactttcagactcttaggagatgtttggttcggttgttttctgttttcattttcactgaaaataaaaaacggtgatgaaaatgtatttgattggatttctgaaaacattttcaggaaaaatgaaaacaggaaacaaccagaaaatgaaaacaagaaatcaatatatcataaattttcagtatttttatttcatgaaaatagaaaacaataaatcaaatcaaacata

SEQ ID NO: 804 - DNA, 1993 bp, Glycine max
tagatcggaacttctatttcgcgttctattttgctatattgatttacaaggaactttaggtccgtttgtttgagattttttttctctgtttttaaccgtgggattactgatgcaacgatgagtttcccgttggatttgtgatgctcgatagatggatctctgatgttcttgagtaatttccgcaaataaaaggaggtaagtgattgggttttaagctgttaaaatagcaaggaaggtgcaaaatggcttcagttggtgtggcaccaacatcatcaggcttgagagaatccagtggtgttgataggttgccagaggagatgaatgatatgagaattagggatgataaagaaatggaagccaccgttgtcgatggtaacggaacagagaccggacatattattgttactaccattgggggtagaaatggtcaaccgaagcagactataagctatatggcagagcggattgttggacatggatcatttggggttgtcttccaggctaaatgcttggagactggtgaaactgtggctatcaaaaaagttcttcaagacaagaggtataaaaaccgggagctgcaaacaatgcgccttcttgaccacccaaatgttgtctgtttgaagcattgtttcttttcaaccaccgaaaaggatgaactataccttaatttggtactggagtatgttcccgaaacagttaatcgtgtgatcaaacattataacaagttgaaccaacggatgcctctgatatatgtaaaactctatacataccagatctttagggcactctcttatattcatcgttgcattggagtctgccatcgggatatcaagcctcaaaatctattagttaatccacatactcaccaggtcaaaatatgcgactttggaagtgcaaaagtcttggtaaaaggcgaaccaaatatatcgtacatatgctctagatattatagagcacctgagcttatatttggagcaactgaatatactacagctattgacgtttggtcagttggttgtgtattggctgagcttatgcttggacagcccttgttccccggtgagagtggagttgatcagcttgttgagatcatcaaggttctgggaactccaacaagggaagagataaagtgcatgaatcctaactatacagaatttaaattcccacagattaaagcacatccatggcacaagatctttcacaagcgcatgcctccagaagctgttgatttagtatcaagactactacaatactcccctaacttgcggtgcacagctttagatgccttgacccatcctttctttgatgaacttcgtgacccaaacactcgcttgccaaatggtcgtttccttccaccattgttcaattttaaatctcatgaattgaagggagtcccagttgagattttgctgaaattgattccagaacatgcaaggaagcagtgcccgtttcttggcttgtgatattgtgaaaaatgtaacaaaactgcaatagtgtcgttcccatatgaatgttccgttatgtatccttcttgtatttcggtgcctagtaaaaactgatttagagatatatggttactcaatattacccaacactcgatgggtattcagaaaaaagccgtgtttcctgtttaacagaaggttgtaaacatcgaatagaagacaagtgtcatgttaaaccggtgttggtgtttgtgaatacaatgatgggtggttggctaatttagttttgctctgcattggaaactcaattgtctttgtggctaatctttagcgaaataacgagacatagtcaacgagagtgcagtttgcaagtctgtcttaactagcattttattttatttttttgttatcttatctactgtattttttacgtactcagtttgatttttactatttcaacgaggtatgcgtattatactagaacatggttagcatctgccgtggctgagaggtgcttgcagtcaaagcagatagcttcagaagaaatggca

SEQ ID NO: 805 - DNA, 1357 bp, Glycine max
gtggggatggccattccacttgctctcaagagaataccaaatagacttctagctgtaaaaaaggtgatagttagaacactcaaactcctcttctggggtttgctattgcaaggtggtttctctcatgctccggacaatctaacatatggagttgacatgaaacatataaggtggtgtggcattcttcagagaattgctctagcatatttggttgtagcactggtggagatattttcaagaagtgcacaggctagagatccagaacccacccacctctcaatattcaagttgtactattggcattggctagttggggcatgcatacttgctgtttacttagctttactctatggaattcatgttcctgactggcaattcactgtccataacccagacagcatatataatggcacaactttaactgtgacctgtggtgtcagagggaaactggatcccccttgtaatgctgtgggatatattgaccgagaggtgattggaattaatcacatgtataagcgtccagcatggagaagatccgaagcttgcaccgagaattccccatatgaaggtccttttaaaaaaaatgctccttcatggtgttacgctccttttgagccagaaggcattttaagttcaatatctgctattctctccacaatcattggattgcattttggacatgtactgatacacttacaggatcatccttccaggttgaagcactggcttctcctaggcttagctctccttacttcaggacttattcttcacttcactcatgccattcctttgaataaacaattgtacacgctgagctatgtttgtgtaacatctggagcagcagcattacttttttcagccttctatattatgctgagggaatcttcgcaggattcattaatgggtggtattatggtgaccctcataacacgctggtctattggatccagaaacatgtcttcattaaggtttggcattcaacgagagtaggcatcctgctatatgtgatctttgcggagatcctattctgggccgtcgttgcaggcattttgcaccgattgggcatatattggaagctttgaatttttttttaaaaatatttgcattaatttttactgtgtatccgtgctgttgctctatattcaatttggggaatgactgaatagccatttcgcttatcaaaatagtttgttgttattataagtatcattcaactaaaaaatgtgaaggataaagacatatactatcctgacaaaggttaagtgcagttcctcaagatcctttcatataattttcattagtccttaacccgtcacatagtcatgcagcgtcaccatcctctcaagtgaacactgaa

SEQ ID NO: 806 - DNA, 1086 bp, Glycine max
aattgaacataattacacatgggtatcgaaagtttcatagagtttgtaagatctttttgtgtttggattgccttctaactcaattgactcggttaatattgactatttaaatatgatctaatggtccgtattcaccgttcttatttattataataatatccatgagttcttacctgatactatgtatgtcacgtcacgcgtgagtactccagtcttagatgttttgttttaaatggatgttttgttgttcagatcactttgagcaatggtgaaggctgtggcagttcttggcagcagcgagggtgtcactggaactattttcttcactcaggagggaaatggtccaaccaccgtaactggatctcttgctggtcttaagcctggtctccatggcttccatgtccatgccttgggggacactaccaatggttgcctgtcaactggagcgcatttcaatcctaataacaacgagcacggtgcccctgaggacgagaatcgtcatgctggtgatcttgggaatgttaatgtcggtgatgatggtaccgttagcttcagtattaccgacagtcagattcctctcactggaccaaactccatcataggaagggctgttgttgtccatgctgattctgatgaccttggaaaaggtggtcatgagcttagcaaaactactggaaatgctggtggcagagtagcttgtggtatcattggtctgcaaggataaactaatcacatgaggttggaaccgtgctttagaattgtggaataaagtagcacccatttaaacccgtttggttaggtccggtctgtgtacggctgaattctgtgttttgcttgtatcgtatctgagggttatatgtagacacttgatgcttaatcaaattgttactttgcctgaagtatgtgttagtggttatccttatttcttgtattagtttgtgcttgaaatatgatatgatactcgagaaatgtgagatttttctgatgacttgaggctatgattagattggtaacagagaatgaaatgaaatgaattggaaaataatgagatggaatggaataaaaatgtcattttattgtttggat

SEQ ID NO: 807 - DNA, 1658 bp, Glycine max
gcctctcctcttcgtgtcaggtaaaagcttggtctcactggaaaagggaaaaaagaaaaaagaaaaacacacaccacagtataaaatggaacctttttttggtttcacatttcgtcatgagtgttgaatgagtaaccttcgttcgccggtcaccaataatacccagtttccgttttcttccgtagtagtgtcccctcttctccattctcttcacttccgttattttgcttctttgcgtcgccatctgaaagaagtgtgcttttttgtctgtttctctctgggttctgagctgttttactctccacattctctatatttgtcttgaacccaccacactctctcttctctcaatttggattcatgggttctaactccatattgaaaaccattccttgatgggtttttctgatcaagttaaggtaagggtctgtcccaacttgttttttgtgagtttccccttgtttctgagtgagtgtttttgtccacttcaaatctggatcccatctgtttgttgaaaaacctgagagggaaaaagcttggtaattgaattgaattgcagcagaaaatgaaggattttccttcttgttttggtgaaaatggagttcaagtggcggattcttcgtcttcaagcgctaataaaagtgcccagaatgtggttacctgtgtttatcaatgcaggattggcggtatttcctgcctgattactgtcacgtggagtaagaatctgatggggcaaggccttggcgttgggatcgacgattcatcaagccagagtctttgtaaggtggatatcaaaccgtgggggttttccaagaggagaggttgcaagagtctagaggttcattcttgtaaagttgatgtgtattgggacctttcttcggctaaatttggttctgggccggaacctctggggggattttatgttggagctgtcgtggatggacaaatggtacttcttctgggggatttgaggaaagaagctttcaagaagaccaatgccaacccattaccccacaatgcagtgttggttgccaagaaagaacatgtttttggtaagaagttgcatggtaccaaggctgtgttttgtgacaatggcccaattcatgatcttgtgattgagtgtgacactgcaagtgttggtgatccgagccttgtaattcgcatagacagcaaaactgtgatgcaagtgaagcggttgagatggaagttcagggggaatcatactatcctggtagatggccttgcagtggaagttttctgggatgttcataattggttctttggtacatcccttggaaatgcggtctttatgttcaggacatgcctctccgcagcggacaagttgtgggctagccaaccaccttctgatttggcatggtctttctccgagagatttcctgagaccaaattgcagggtctcagtttctctcttattttgtatgcttggaagaaccagtagatatgtagaaatccatcacatattgagtactaacagacctctcagtgagttttgatttatcgaccatgtgatttaaacattgttgagtaaaaatgagtacttatgtttctctcattccccttattaaattcatgtcctcaatttagctgagctatttgaacaaaccagagacttttttcccccaaattgctgtacattt

SEQ ID NO: 808 - DNA, 1544 bp, Glycine max
cttcttgttgtttgctatttttttagttataaactggcttgtgctgtatgttaggcttcttatttcatgttaatatgttatttaccttggcgatttcaacttgtactttatcttaagaataagcttcaaggctaaaccaatgtacacaccttgtgcaggacagacaaagctgattcacttaggagcctcaagagctatgtctacatcttctcgtgctcttcccactcccttggaaaacaagtatatgaaacccccagattcttttcagctttcacccgtcagagatctgactgcaaattctgcctcatcaaattcaatcagaagtgctgggaagatgttgtcttcaccttctgaatgtcccgatgatatccctttttcctttgtttctcagacatcaggtgacaatgtgtcttccgaaattcattcaacagcattgatttctcaccctcaagataatgaagatctttcctggggaccagatccatttcaggatattcttggctttcctgaaaatgtttctgtccagcatgatcaggtgcaaaacaatggttgttacataaatgatgataatgtcaaaagatctgattttggggagtgggttgatcagttaatgtcaattgatgattctcttcacccgaactggagtcaacttcttggtgatgacaatgtagcagaaccaaaaccaaaggcatctcatgttcctcagcagcagcatatagcatctgtagaagttgttggcaattcagcatcaactgcaccgcagactaagcctagaatgcgttggactccagaacttcacgaggcctttgtggaagcagttaatcagcttggtggtagtgataaggctactccaaagggtgtgttgaatctaatgaaagttgagggccttactatctatcatgtaaaaagccacttgcagaagtatagaactgccagatataaaccagagccgtcagaaggaaattctgagaaaaaggtgactccaatggaagaaatgaaatctctagatttgaaaacgagtaaggggatcactgaagcattacgtttacagatggaactccagaagcgacttcacgaacaacttgagatccaaagaaagttgcagattcaaattgaagaccaagggaaacgtcttcagatgatgtttgagaaacagggagagatgggtgacaacaaggttaatggctcctcggacacaaacgaggaaggcgacaaatttgaaagcattccaaaagccatgcctgaagagaaggattcaagcacaagaaaacaaatagcaggtgaagctgaagaagtgatcaatgaagatgaagctgcaccacccacaaaacgggtgaaaagttcataacagcaagatcgttttatggttctagatttgtttaatattcttagactggtttggactgcatggaacttgtaaaaatattatggatccaaggatgtttcaacttgctcatttatcactgccagaagtaaaatcttgttttatatttgttatcatatacaaaatcagaatggaagaatgaaagaaataatacattttc

SEQ ID NO: 809 - DNA, 1363 bp, Glycine max
cgcagagagagagagagagagagagagagacatcgctttataaaggcaaagagagtcaacagtgacagtttggcattgaaattctaagctttttcagatagggtcatactcgccaacagtaacacccacctacttgtcagcaacactcactcgtttactaaattccccaaatctaccttacccatccagatcataacccgaatagtccctatccccttccttaatttcccacattcctcattcaattgattccttccaccaccacaccaacaccaaaacactaacctttattttattttccccccaccaattgtctctatagtaaaggaaacaacatcgatgccttgtaaggccagagagcaggccccgttttgtgtttctgtttcctgacaaatcctttttctctcaattctgagcagaaaacttatatccttgtctgaggttaacttttttcatcgacaacaaccagagcaagaagaaccagtttttgtttgtgtgtctatttcagctgccaaatatggataggagcgggcaaataccagcgtttgggaactgggattacgcgaacgagttgccaatcactcagtacttcgagagtgcgagacaagctggtttagttcgttacagttcctcctccggcgaaagtgacccttacgtgcgtgcagatcgagacctctacgccgttgattttaagaaaccaccgattcgcaacatgccaccttctactcttaaaaaggcgacgaggaacaggggaaggaggtgtgttgtggttaaggaaaaggaaaaggaaaaggagagtgtgaagatgaatatgagaaagcaggggaaagtgtgcgacgtgacggaacaggcaaggaagccagtgacagtgagcaaagagatgatgcgtctacacgacgccgttccgcgatctccgctgcctcgtggtgttagacttcccaaacctgttgatgaagatctctataagatcccaccagagctacttcgcacaactaagcggaagaaaatgctgggtttcatttccaagtgtctggttcctgctgcttgcgtttcatgatctccattaaggactgcgcatgtgcttttctgagtagctagctatcttgtgctggtttttgctgcaccccgatgctaatatgactcctttttcttatattaataaaaattatatagtatattttctgaagttaagaatgaatgtagtaattgtcttttaatttaatttaatggctttcgtcttggttcatttattatttatttagtcggtgcttgcatttattattatcttcgaattgaatgagtgtttgttggtattgtgtggtggaccataatatatgcctctgaatctctgatgtcatactaa

SEQ ID NO: 810 - DNA, 1563 bp, Glycine max
cgcagagagagagagagagagagagagagacatcgctttataaaggcaaagagagtcaacagtgacagtttggcattgaaattctaagctttttcagatagggtcatactcgccaacagtaacacccacctacttgtcagcaacactcactcgtttactaaattccccaaatctaccttacccatccagatcataacccgaatagtccctatccccttccttaatttcccacattcctcattcaattgattccttccaccaccacaccaacaccaaaacactaacctttattttattttccccccaccaattgtctctatagtaaaggaaacaacatcgatgccttgtaaggccagagagcaggccccgttttgtgtttctgtttcctgacaagttatttatagatagcctttattatcattatcattatcataagaagaagaagaaaagcaagtaaaaaggtttcaagttttaacccatttgttttgctttatctttttcacttttcagatcctttttctctcaattctgagcagaaaacttatatccttgtctgaggttaacttttttcatcggacacaacagacaacaaccagagcaagaagaaccagtttttgtttgtgtgtctatttcagctgccaaatatggataggagcgggcaaataccagcgtttgggaactgggattacgcgaacgagttgccaatcactcagtacttcgagagtgcgagacaagctggtttagttcgttacagttcctcctccggcgaaagtgacccttacgtgcgtgcagatcgagacctctacgccgttgattttaagaaaccaccgattcgcaacatgccaccttctactcttaaaaaggcgacgaggaacaggggaaggaggtgtgttgtggttaaggaaaaggaaaaggaaaaggagagtgtgaagatgaatatgagaaagcaggggaaagtgtgcgacgtgacggaacaggcaaggaagccagtgacagtgagcaaagagatgatgcgtctacacgacgccgttccgcgatctccgctgcctcgtggtgttagacttcccaaacctgttgatgaagatctctataagatcccaccagagctacttcgcacaactaagcgggttcgtcaccgcctaacataataacactttccatttgtttcttttttcatctttcactttgtttcatgtgcagaagaaaatgctgggtttcatttccaagtgtctggttcctgctgcttgcgtttcatgatctccattaaggactgcgcatgtgcttttctgagtagctagctatcttgtgctggtttttgctgcaccccgatgctaatatgactcctttttcttatattaataaaaattatatagtatattttctgaagttaagaatgaatgtagtaattgtcttttaatttaatttaatggctttcgtcttggttcatttattatttatttagtcggtgcttgcatttattattatcttcgaattgaatgagtgtttgttggtattgtgtggtggaccataatatatgcctctgaatctctgatgtcatactaa

SEQ ID NO: 811 - DNA, 1743 bp, Glycine max
atgacactatatctgctcaattccactcgtctcacggaaaaattttggttgctctgccttcaacgttacgctgcttcacaatgggctaatttaacttctgtggtgggtacatgtgtgctgaagttcaatacgtcccaatatgtgccatttgatgagtgcggtgatgtgaatgaggagatagacaagtggggtgacgatgggttcccgacaaccttgtgttgtcgaaatgctctgacggttttgtcgaatgcgttggcctcgcaggccctgaactcaggaggacaagtgttcatttcccaagatcagttgcagagttgtgcccagtcatttaacccacagcaaggggtatcgcttaattcatgcggctttcaaagcttgtacctaggcagttccaaatgctccaacctcgttttacaggatgttaggaaactgcaacagtaccaggatgcattggacaagtgttcccacttcgaccacccatttggtgaatcttgtgcagattgcaccggtgcaatattgagcttgagagatggtttacataatcaagtggccaacaacaacaacaaccacactgagctagccatatgtgaggtagcagctattgttgctgttgcagctgggaaaccaaacgatcctgtcgttgacaaagtcttacgctgcttgccaccttcagcttcaggatcagacaagagtattatccttgcaatattgcttgtggttattatggtaaaatgtttgtccaagaagaagtttcgtagacaggcaaacttgaaggagatcgtggcgtggtctggattgtactggttctgcaaaagggaaattgagaatgccatgaattatggcggtgaaaagatatgccttggacgtgggagtacagggcaggtgtatagaggtgttctgccaagtggtcaactcgtggccatcaagcatttaacaaagagtaacacctccgagtctttcactcgagaagttgaaggcctttcaaggcttcgccatcctaacctggtttgcctctttggaagttgcatagaaggggatgagagatatttagtctatgaattttgtgcaaacggaaatcttgctcaacatctcttaagaagagatagccacttgacatgggaaacaagagtaagaattttgagagattgttcatacgcactcaagtacctccaccatcatatagaaggctgtgttgtccatagagatataaagcttacgaacattcttttgaatgagaaataccaagccaaactatcagattttggactggcaaaggtgatggggattacagagagcaaggtttttactgatgttagaggaacaataggctacatggatccagagtacatgagtaatgccaagctaacctgcgctagcgatgtatacagttttggtattgttgctctacaaattctgtcaggacagaaagtcatagaattggatcttgatgccagagatcaactcactaggaaggcaagagatgtgagcatgggaaagcgtccactgtcggattttgaagacccgcgactaaatggaaaagttgataaggcagacttcgaagccatccttcagattgcagtgttgtgtgttgccaaatcaagcaaaggtcgtccaaccattgagcttgtttttgaggaattggacaaggtctgcggggacacagaaacacggatgaagcaaaagaaggatgagagctcatcaacaacatccaccccgagctccaaatcggctcctctatgacat

SEQ ID NO: 812 - DNA, 2734 bp, Glycine max
aaaaacatgcctcacagaggaatcagagacagagagagagaagggtccctgcttctgatctgaacacataaaattattttattttattcaccgtgttggatctgaatctctgggaaccaattgttgcactataaaatagagagaacctcgtttttcaataatattaaatgctagtttcctcattccaccatatgcataccattggcagaagctatacctgtcttgtccagctagcatctatggacgccattgtcggagcttgatcatggttgtcttcgctgaatgttcttcccaatagaggttctgttctgtacattcattgcttacttgcctctccggcatggcttacactgcagttgccatgcctacatctccagcagctacctctgcaactatggacattgcaaaagagcataatggtcttcgccgctcgcaatccagcaaagaactatgcacacgttccattatgcggaggtcttattctgacaaccacctatgttgctccatcaatcgcatacaagccacatcagtgccgccaaaacttaagagcaatcgatcaatgggcatttccccatttcaattttcaggctccatgcttccaaattcactgcgctccttcttgtttgacccagaaacaagcaaggatgtaagtgtggaggagaaggttgtaagtattgaggaaaacatggtggaaagcagcaaagaagagatagcgaatagagccaactgggtagagaggcttatggaaatcaagaaacattggagaaacagactgccgaaagaaagcatggatccagatgcaatatgcaacgaaaatacgtatgatgaatgtgaatgtgatggagatggagatgacaatgtttgtgtggtgggtgaagatgaagatgagcaggaagtgacatatgattgcgactcattctcaaactttctggttcaagtaccatggtctgataccaaactatactctcaacttgctttcctgtgcaacatggcctatgtaataccccaaatcaaggctaaggacttgcgaagatactacagccttcaatttataacatcttctttagagaagaaagttgaagtggccaagttaaaagtgaaacttgatcaagactccactcgtgttcctatagatgactcggatgtctcagagaaaggcaaagacagtataaagaagcctcaaatcaaactagcttatgatattgctgcctcagcagcctcttatgtccaattacgagcgaaggatctcttacaccgtgctgctaagtcacgagacacacaacagactgaaaatgaagattctaatggaagaggagactcaccacgagaagagctagaaagcacttcgcgaggttacaaatcagaggttgcagcttatgttgcagcgtccacaatgacagcagtggttgcagcaggggagaaggaaaaacaagaagcagcaaatgacctccaatcacttcattcctcaccttgtgaatggtttgtttgtgatgatcccggcaattacactcgatgctttgtaattcagggctctgactccctggcatcttggcaagcaaacctcttctttgagcccaccaaattcgaggacacagacgtacttgttcacagaggaatttatgaggctgcaaaaggaatatacaagcaattcatgccagaaataatggagcatttgaagagacatggggatcgtgctaagcttcagttcactgggcactcccttgggggtagtctctctcttttggttcatttgatgctattgactaacaaggttgtgagtccctccactcttcgaccagtagtaacttttggctcaccatttgtattctgtggaggccaacaaataatcaatgagctaggcctggatgagagccaaatccactgtgtgatgatgcatagagatattgttcccagggccttctcctgcaactacccaaaccatgtagctgtagtccttaagcgcttaaacagctcatttcggtcacatccatgtctgctgaaaaataagctgttgtattcaccactgggtaaaatattcatcctccaacccgatgagaagacatctcctccacatcctttactccctcgaggaagtgccttctatgccctggacaatactaaaggtggatattctccaagtgttcttagaaccttcctgaatcaaccacaccctattgatacactaagtgatccaacagcatatggttcagaaggcacaatcctaagagaccacgactccagcaactacctcaaagccatcaacggagtcttgaggaaacattcaaagattaccgttggcagaatgaggaagcaaaggattaatcagttgtggcctctgttgacatcaccatctccacactcttggagccatgaacagaacttggagagatgcagcttgaggacaaaggagatagttacaggggtttaaagaaaagcctttcttttgaggttcccacagatcatgatcatgatcaaattaattaaaatcatggaattgattagcaaactacatcattttattctatgtacatccctaaataactagtgtagtatgtatccattattccatatttgaaaaccttgtgcatataaatgtcgataagtcctatagaaaatagaacaaaattgtctactggttttccatgaagcaatctagtactatcttgttactgccattgagaatcgcaagtgtaatcttttaactagacagacgaataaatactcaccaaaccaa

SEQ ID NO: 813 - DNA, 711 bp, Glycine max
atgaatcaggaaatgaatggggttgaggctgagagggtgaaagtgaatgtgcatgacaaaatagattacgtgtttaaggtggtggtgataggggactcagcagtgggtaagactcaaatactctcaaggtttgcaaagaatgaattctgctttaactcaaagtctaccattggagttgagttccagactagaagtgtgacaattaatggcaaagtcatcaaagcccagatctgggatactgctggccaagaaaggtacagggcagtgacaagtgcatactacagaggtgcattaggggccatgctagtgtacgacattactaaaagacagtcttttgatcatgtggctaggtgggttgacgaattgcgagcacacgccgacagttccattgtgatcatgctcattgggaacaaaggtgaccttgtggaccaaagagtggtacacgccgaagatgcagtggagtttgcagaggatcagggcctctttttctctgagacttcagctctcagtggtgaaaatgtggagagttcctttttcaagttgctggaagagatccatagggttatctcaaaaaggtccttggaatgtgataatgggaaggccaatgctgacaacaatgttgccactcttaaagggtcaaaaatagatgtaatctcaggtgctgaattggaaattgcagagatgaagaagttgtcttcatgttcttgttaa

SEQ ID NO: 814 - DNA, 2586 bp, Glycine max
gagagtgtgtagaatatatttagcagcagaaccgtatagtatgcccacttcaggcacagctcccgctaatctatcccttctcgtgttttgattttctgaaattacatcccaaaatttgttgttatcctcttgtactttagctgacataggtgcaatcttgttttatagcggttttgcggacgtgttaattacaagggtaggtcagggagagagagcctcacacaaaaggcatcactgctcaaaccacaataagaagctaagaagcctaataataagtaataacaccacacaccattttctcttataagttctgttctcttcaaaatggagactaataatgcatgtactatgcattctcattgcatagagatgtccatggaagtgcaccaagttgtgccaccacctcacaagagcacccttcagaaactcaagggtaggctcaaggaaactttcttccctgatgatcctctgcgccaattcaagggacaacctcttaagagaaaactgatccttggagctcaatatgtgttccctattctccaatggggtcctaagtataatctcaaactcttcaaatctgaccttgtttctggcctcactattgctagcttggccatcccgcagggaattagttatgctaagcttgcaagtcttcctccaattgttggactttattctagttttgttccaccacttgtctatgctgttcttggaagctcaaaggaccttgcagttggacctgtttctattgcttctcttgtgatgggatccatgttgcatcaggaagtgtctcccacaacagatccaattctgtttcttcagctagctttcacttcaacattatttgccggtctctttcaagctttgcttggaatcctaaggctaggcttcataattgattttctatctaaggccattcttattgggttcatggctggagctgctattattgtctcactgcaacagctcaagagcctgcttggaatcacacatttcactaatcagatgggtctgattcctgttatgacttctgtttttcacaatatacatgagtggtcatggcaaacaatattgatggggatttgcttcttggtactactactattagcaagacacgttagcataaggaaaccaaaactattctgggtctcagctggagctcctcttatgtgtgtcatcatctctaccctcttggtttttgcaattaaggctcaaaatcatggcatcagtgtgattgggaaattgcaagaaggaataaatcctccatcatggaatatgttgctctttcatggaagtcacctggacctagtcatgaaaacagggcttatcactgggattttgtccctcactgaaggtattgcagtaggaaggacatttgcagctctcaaaaactacaaagtggatggaaataaggaaatgatggcaattgggtttatgaatgttgttggctccttcacttcctgctatgttacaacaggtgctttctctcggtcagcagttaacaacaatgcaggcgcaaaaacagctgtgtcaaatgtagtgatgtctgtgacagtcatggtgacactcctttttctcatgccattgtttcaatacacgcctaatgtcgtgctgggcgcaatcatagtcacagcagtaattggcctcatcgatctccccgctgcttgtaacatttggaagatcgacaaattcgattttgttgtgatgatgactgctttcttaggtgttcttttcatctctgtccaaggaggccttgctcttgctgttggattatcaactttgaagatactcttgcaaattacgagaccgaaaacagtgatgttggggaagataccaggaacagacatatatagaaatcttgatcaatacaaggaagctgtgagaatacctggatttcttattttaagcattgaggctcccatcaattttgccaacatcacatatctcaacgagagaacgttaagatggattgaagaagaagaagacaacataaaggaacaattaagccttcgattcttagtattggaaatgtcagctgtgagtgctgttgacacaagtggaatctcacttttcaaggagttgaaagcaacactggaaaagaaagcttgtgttggtcaatcctcttgctgaggtcatagaaaagcttaaaaaagcagatgaagctaatgatttcataagagcagataaccttttcttgacagttggagaggctgtagcttcactttcttcagcaatgaaaggccaatcatcaaccattacagaaggggcacacacaattgtgtcacataattgataaaataagactgcaaaatatataagcaaaagttaaaagaaaaagaaaaaaaaatagaagcagcaacaactacaagactagcatagaatttgcctaatggcaataccaatcattgtaaaatcctacagtttaaacaattgaagtgaaatgtgtacccttgtcatttgtgcttgtgcttactagatttgcctcacaagcatcgtagtcgtaacttgtatgggaactacttgttgcttgttaattcaatcgttgaagttgatttccaagcacttttcagcacatccagttcaaca

SEQ ID NO: 815 - DNA, 3033 bp, Glycine max
atgacttccctcagagaactcctcacagacgaaggcttctaccaaacaacccctaacaacaacaaccctttgaagccaaagctcaaactctcaccaccaacaccagagataatactaaactcactccctctacacctatgcaatgacagaaaaagctttgttgattgctccaacaaaagcatagacaagtccatgacaagaaaagggtcttggccatttcactccaatactcaaagggttgttgttggttcagtttctgaaacttcattggtgtcaccaccaccaagaactgttgtgggaccccccatggatgaagttgccacaagagcagtggttgctatcctaagtggatacattggaagatatgtgaaagatgatagtttcaggaaaatggtaagggacaagtgcaattcttacttggtcagaaggagaagaaacggttcaggatcatcatcggaagaagaaaatgaggttctggtgaacatgaaactaggcatggagaatattgacaagttggtgcaggatcaagggacaaagaaagatatgaagatcaaaagcttgaggaattccattgagcttttgaccatagttgcttcactgaatagtaaaattagaacaacatcaagggaaagtggttcaacttgtggaatacccaattcccatatctctgcttgtgctcagctctacttggcaatagtttacaagcttcagaagaacaacaggatttgtgctaggcatttgctgcaagtattttgtgactctccttttttggccaggacttatttgcttcctgacctttgggagcatgtgttccttcctcaccttctccatcttaaaatttggtatgccgaggagctcgacgcagtttcggcctcaagtgaatgtcaaggtgagaaggacaagaaaatgaagaccttgagcaaggtgtatggtaacaaggtggacacaggaactgctatgtttgctttgtattacaagcagtggcttaaagttggggctaatgagcctcctcttcctattgtctctttgccttcaagaccaagttgcagatcatcaagaaaaatgtcttcagattcttttgttttgcattcctctatcaacacaaacttatacaaggaagtatttggccccaaactagagatgaaacctacccctctagctgaacaaaatggattgttgacaattagatggagctcaaggaatcatgaatacagctgcagttcacttcagaaagaagagacaatatacctaggaagatcatcaaggtcaattgacaagagttatgctgaaataaggctagggtcacagagattggacaattttcaatgcttttcttgcaggagtatgcaagcagaaagcttggtgaacagcagctacacatcctgcaatgcttcatttagaaatgaaacaactgtcctttcaagtgaatttgttggagctcttacaactatatgttcatcagatatattaagtgaatgtgaattctcaattcgtgtgattgccaaagcatggttgaactctcatgctgaccctctaattgaagaagcactgtcacagtctagtgtggttgaggctatccttgaggtattgtttgcctcaagtgaagatgaaattctagaattggctatatcagttttagcagaattagtaggaaggaatgatgcaattagacaaattatgctgaactcggatccacgactagaaatctttgtgagacttctaagaaggactggcctatttcaaaaagctgcagttctgctttatctgttaaagccacaagcaaaacagatgttatcaccagaatgggtgccactagtacttcgagtgttagaatttggagacaaagtgctgaccctcttcacagtacaatgcaatcctcaagtggctgcaatttactttctggaccaacttcttactggtttcgatgaagataggaatttagagaatgctaggcaggttgtttcacttggtggattgacccttcttatgaaaagaattgaagaaggagaaatccatgagagaaacaatgctgcttttatcatttatagttgcattcatgctgaagaaagctgccggagttttctagctgacaatataaagaagagttctttactagaactcatcgttcttggcaatagtaaaaattgcagtggatgtgccttttctgtgctagctgagttactataccttgatagaactaccaagattttaaatttcttgaggggacttaaagatggatggggtggcctaaacacaatgcacattctgttcatctaccttcagagggctccacctgaagaatgccctttggttgcagtggtattattgctgtttgatattatggaagatcctttcaaagagagcttatatagagcagaagcaattgaggcaattgtggctgctttaaattgtcaagtgtgtaatgacaaaatacaagaacaatcagcaagagctttactcttgttagcaggacacttttcttatacaggagaatcattaatggaaagaactcttctacaacaagctggcttccaagaaaattgcttagaagattcctcttatggcaaggaaattgttgtttatgattcagctcacaagaatgaagaggatgatgaagctgaaagttggcgaagaacagcagccaatgtcttgttgaaaagtggaaataagaatttactaagtgtactttcagattctgcagcaaatggagttccaagtttagcaagagctagccttgtaacaatttcatggatgagcagctaccttcacttagttgatgatagaaagcttccaccaatggcattatcaatcctcatgccattgttgctaaaatacttgaattatgacaaggatgttgaggcaagagtcttggcttcatattcattgctatgccttgtaaaaatttcagcaggatgtgtctctttcctatcatcactagataaagactcactcaaacatctccagaatctctctctagtgacgtggacttccaatgagctaatttcaatcatctccaaaagcagcttgcaataa

SEQ ID NO: 816 - DNA, 1245 bp, Glycine max
atggttaaggtctggaagccatggtgtgttttgatttctgtgctgcatttgttcctccacaccacatcttctgatttcatcgtcaagaatctaccaggttttggggatcttccgttcacattgaatactggatacattggtgttggacaaagagaagaggtgcagttatattattactttgttgaatctcaaaggagtcctttgaatgatcctcttctactttggcttgttggaggtcctggttgctctgcccattctgctttcttctatgaaaatgggccattaatgtttaattttcacgattttaatgggagttttccacagcttctattgaatccgcacacttggacaaaggtactcaacatattatatgtggatgcacctgttggtacgggatattcttactctaaaacacaagaaggctattatagcaatgacgaacaattggtggaacacatgtatgattttttccataagtggctggtggatcaccctgaattcagatcgaatccactttacattggtggtggttcttattctggcatagttgttcttcccctggttcagaaagtatacgaagattatgaaactggacgctcaccaatcctgaacatccaaggccttgtgcttgcaagtccaagacttgactctttcatggacaataacacaaaagttgaattcgctcaccaacgaacacttatatcaaatgaactatacgagtcaattaaatctaattgcaatggtgattatgttaatcttgatcctaacaacacaaaatgtatgtcagattatgaagcctacactgagttagttcgttacataaatgaatatcaaattttggaaccaagttgtgtgattgcacctaaggagaatcaaagaattctttctcaagaattaaattatatccaccaaactaaatttaggtgtcgggatgacttatatgcaattggagaattatgggcaaatgatccacatgttcagaaggctcttcaagttagagagggaacaaaagatcacttccaacgatgcaatcgcagcgctgcatatacatggaacgttcctagtgtggttcaataccttcataatcttacaaacacaaacatgcgatctctaatttattgcacggatcttgacatgtcgataccgtatcttagttcactttctattgtcaagtcacttaatttgaaatttgatatgacttggcatccatggttcgttgatggtcaagtggcagggttagtttaa

SEQ ID NO: 817 - DNA, 5455 bp, Glycine max
ccttttgagaaacattcattttactaactaattttgtttccttttcgtccaattccttttgtagtggggtacagaatcacggtggataacaagttgcttggggtaaaccagaggatcatcgagcaagagcttgcaaataagaaacaagactacctgatggatgaggggcttgctcagattgttaaacactacgcatcaaataaggttgcatttaagataaagttgtttccaggatcttcaccaaaagatgtggctttagaacaggccacaaaactcaatgcaacttgggtgatacttgacaggcaaatgaagaaagataaggagtttttcctggagaagctttcttgtggtatatctatattaaggcataacaatcggattgttcgactacgacctatagatctcccagacgaaataccatgtaacggccatgaaacatatgatgaaagcttaccaagtgttccatataaagatcttttcaacgttgatgttttccccaagagcacacttgaagttgatgagttgaaccagatacaaagcaggccctatgaggaagaggggtgctcaaatattactaccaatactaatgaaaaaacatgtcagacaatggatggaacagaaataaatagtaaccaaatgattgacaaaatagaaagagatgagcaaggccaagatcaagaacagttgcaaagcatgccccatgagacagaggaggacacaacaattgtgattaaaaatgatcaaacaactgctcgagaaataggtgatcaaccgaaccaagatgaagaaaagacaaacaacttcctcaatggtgagaggtgggacttgaggaatccagaaaagaatgaagaaatgattaatcaaccaatagatgatctgctgagccggaatcaagcacagatgctgagcatatccaatggggttatattggatggagaggaagagaaaattattttggaaaactcaatgtccactttctgctctgtctgcaaaactagacgaccaaatattgggtggaaaaaggaatttagttatgaagaactccaagcagccacagatgcattttcattgaagaattgtctctctgaaagtggatctctattcactttccaaggccagatggagggagggatgaaactagtggttaagcagcatgatgtaagaaacactcaagtaagggaaaaagttaattcaggaatgcaaaccatcctcaaagctagacataagaatgtgatcatgctatttggttcatctacagcagaatgtttcctgttcactgtatatgagtatgcatgcaatggttcacttgacaagtatctatcaaaagaaggctccagaccattgacttggatagaaaggaaaagagttgcaataggcattgccagaggtcttaagtacctacatgaaaataacattgttcattgcaatataaaaccaagcaatattcttctaacacatgacttcaaaccaatgattggagattttggctatgggaaagaactagatttgaagtcctacaaaaataaaaacaaagggaattgcgaatatgcagcaccagaataccaggaaaagcggaaattttcaactaagacagatgtatactcatttggtgtggttattttagagttgatcacagggcgaaggactacagatttaatgttggaagataaatgccttgttgaatgggcaaagcctcttcttaaaagaaagaagtactcagagttggtggatcccataatcagaaactcatacgaagaggaacaccttcgttggctggtccaagtaacaacacaatgtctaaaaaagaatcctaaggaaagattatcaatgaatatggttgtttctgcattacaaggcatagcagaaagtgaaacctgccacatgacagaagacattactccagctatatcagattcaacaattgtgccagacataaatggttcacaaggtccaacaacaacaaaagctgatgagcaaagtcaggaagaggagaaaatcaagagcagattccatgcggaggaaaagaagttaagactaataattgaaaataatcacttttactccgataaacttggccagattgaagaacagatgcagagaaggccccaaggggaggagaagagctcaggaaagttgataatcaatgaccgcatgatggatcagacagtagttaatcagctgagtgagtttgaagaacagatgccaagcaccttccatagggaaggcatcacaactcagaaaattagtgtcaaccacatgataagtcccacaaaaggtgatcagttgagccaggatcaagaagaggagataaactttattgaaatgaaaataggcttaataccagaacctattagtggaatgatagatcaaacaaaagcagatcagctggtccaggataaaacacaaacacagcggagatgccatgacgatttactggatgagcgtcaaggtgaaatcattttggagaattcaaagtcctctgcatgctgtatatgcaaaagtaggcgtccgaacaatgcatggacaaaagactttaattatgaagaactcctagaagctacagaaggattttcaattgagaactcgttatcagaaagagaagatggacctacttttgaaggcttgctagagagacaggtaaaaatagttgttaagaaatatcaagttactacatcccaccaagagaagatattaaaatcagaagtacagttgttcatcagtgctagacataaaaatgtggtcatgttgttgggtttatgcacaaataaaagccaactgatgattgtgtatgagcaagtatgcaacggttcacttgaacagtacctaacaaggggaagtttccagtcattgacttggaagcaaaggctgaaagtggcaatgggtactgccagaggtttaaagtacctacatgggaataacataattcatggaaatataaaaccaagtaacattcttctaacacatgacttcgaaccacggattggagattttgactttggaaaagtgaaacatggaccaaagaaatccagcaaagataaaagtgtacggaattctggatatgcagcacctgagtatgttgagaatggaaaagtatcaaataagacagatgtgtactcctttggagtggttcttttagagctgatcagtggccggagggctacagacaaattaccaggtggaaaaagccttgttgactgggcaaggcctctactgggaggaaagaagtaccctaagttggtggatctgaaaatcagtaactcctatgaagaagaaaaacttctatggttggttcaagtaacagaacaatgtctcagaaagaatcctaaggaaagaataacaatgaatatggttgtatcttcattacaaggcatagaagaatcagctgagtattctgtaattgaagactctcctccagaaaactcatgcttaccacatgatgagcctgccatgattagtacacaaggtcaaatgaaagctgatccagtgaagcaggagcaagaatggattggcagaaaccaatatgaggaggaaagaagcctaagattaacagtcataaccaatgacataataggtcagcgaaatgcagatcaactgatacagggtggagaagatgtgcagagcagcccccatgaagagatgtccagagtaacagttatcagcaatgacgtgattgatgagaaaaattctaaccaaaaaatccaggaaaaactgcagattaagggaagctgtgatgagggtttgaagaatgcgaatgaagcgaaagtcattttggagaattcgaagtcttctgtatgctcaatctgtagaagtaggcgtccatacagtggattgcaaaagaaatatacttatgaagaacttgaagctgctacagaaggattttcaataaagtattctctatgtgaaggtgaatatggacctgctttcagaggccagctagagaataaccaagaaatagttattaagcaacacacattcacaagcttacaagaacagaaggtctttatctcagaattccaattgctcataaatgccagacatgaaaatgtgatcatgctgttgggttcgtgtatacgattaagtcaattgctaattgtatacgagaaggcatgcaacggttcacttgaccagtacttatcaaggcaaagtgctacatcattgacttggggagaaagggtgaaagttgcaataggtgttgccagaggtctaaagtatctacatgagaataatatagtacatggaggaataaaacctagtaacattcttctaaatcatgagttcaaaccaatggtaggagattttgtgtttggaaaagaaagatgtgaattgaagaatgtctgcaagcaaaaaagtatacggaattgtggatacactgcaccagagtgtcaggagagtgaagaattatcaactgaggcagatgtgtactcttttggtgtagttcttgtagagttgattgccggccgtatgatagcagataaaatattaggacagaaatgtcttgttgaatgtgtaaggtcacttcttggacgaagagagtatcgacagttggtggatcccaaagtcagaagctcctatgatgaacaagaacttgtttcattgttccacataacagaaaattgtctgaaaaagaatccaaaggaaagattcacaatgaatatggttgtctctgcactgccatgtgtagcaaatagcaatggcctctatgtaaaggaagacttttcaccagaaaactcaaatgtttcagatgcaaaaaactcaaaaggtgaagaggaatcactgaaagaaaacaatttaggaacagagaatactgaagaggtaaggatgaatcacagagaaggtgagaaagaggaatcattggaggaagaagatttagacacagagaatagtgaaaaggtaaggaggaatcacaaagaaggtgagaaggaggaaacactagaagaagaagaagatttaggcacagagaatagagaagaaagagtggaacaaataacttgtagtagaggcaataatgaaccagaagttagtcaagagtgtgatacctacacaaagtgtggtgaaattagtaagaaaacagaagaaaaagaaggttctagcaccaagctatgtcaaaaatgggaagggtgcttatcttatggtggagctagaaaattttatcaccaaggggctcaagaatacacagcatgtaaagaatttttcggctggtgtgattccatttgagtatttgtttcaaaatttaaagcaacatttacacatttgttttgtaacaacctatgaagaaaaaaaaaatgagtgaatcatacacataagtgggaaggaaactaaattagcatttctgaggattattgtacctaacaacattttatacacgtacatttatttatctcttacagcatcttaagtgcatgggatgggatttctttcttggcataaaacatagattatgcatgagaggattatc

SEQ ID NO: 818 - DNA, 2059 bp, Glycine max
aaaaacaatttttacacattgtctcagtcaatttacgtcaacgtcacgcaccctaaacctggttttccctgaacctcgtgcacccacaaccttgcgcagcgtcaacctcgcgcacccttatcctcgttgctttctctttgcacttcattcttggctttttcgacgactcaccacctgcttcaaaagatgctacaaaccggaagaagcactagtgctatagttatcattcttccaggggataaaatattaggtctggcaaaaatttcttgggtattggaatcccaggagatgccaaggacttcttcaatcaagtcgagtcattaggttttctagagagcaataggaaagtgctttactaaaaacaatcttattttaaattgcagctttatgggggatatttccatatattttcctgtttcttctttgccgatatatcttgacctcattatatctagtgataatatgtaacttgtatttcttattgtggtgtaggatttccattccattgatattgtcactcccagaaagagtttattcattgaccaagaaaggccaccttaagaaattgggatagttgatggggtaatcccattgccttatcacgacatttgtctggcaaaaggaaagtaggaaatagttggtgaagggtgatctagtagccatttggttgtagtcgattttgagtctcagccatcctttggtaatgcagaaatcacagttctggacagtgatgttggaagtggtgaaacccagaaaaaaagttgaggttttctttccaattgacaactcctcatggtcatgtttttaagcctaatcaggcgtttttcaagttgagacatttaaaacatgtacagtttacatgttctgatttggtaaatcataaatctagttgaggatgaaaatgacatccaaaatgttcctgcttccttgaaatgccagctttgtgaccgacaatgaaccaaggaaacattactaaatggaggaaacaagagggagacaaggttaatttaaaataccttggtagagttgtgttcaacacaaatgacgggaactgattcacacacaactatgattgatggcctgggtgttgctggatggggagttttgccccaaaaagtttcaattttttagaacaagcacattcacggttggctgacgttgttgccattgaggtcacgggtggacctaaagtttcattccatcctggaagagagtcaacccaaataggaaatcaaatcaacataacaacaatgggagaagctacatgtttcctttttcaaatactagcacttcggaggcttaacaacaactatgctctcgactttgcagttgatagatacacatgcaacatttgttaatgcaaataccattcaattacctgtgtgggaatggaacttatcaaatagtttggtcagaaacaaattaagtatgtgagagtatgtaccatcaatatagtcgccaatgtggctttcaatttttcttcttctctgttttcaaggtcttgcgagatgtggaaagagttgcagactaaggtggctgaattacctaaggccaaacctcaaaagaggaaactacaccaaggaagaggaggaaactattatcaagctgcaccgacatctgggtaataggtatgcaacagagcatagatgtagagtagttgttaaaggaccaaatctgagtggaaatatatcaggaacagagccattgaaggacaaccacatacttttgaaagtagaagctttagatgattctcatgaagcaaggaacattgttgctgttgttaatgagttgtccaaggaaataacaaaaaatttggtttctcatcctgtgaatgctaaatgtactgcaaaagggaagaacatagcaaatttagtccttttaacccatttatgtatccttctacttcaaaggaaaacacatcaaatatgtagcaatcattagaaataaaataatatagaattgtatgttttgcagttttgagtttcccatctttttagcatgatagtatgttgcttttttaatttttaatattgttgacgttcaaaaggaggtgactgag

SEQ ID NO: 819 - DNA, 626 bp, Glycine max
atgttgaaagttgcattttgtttagtagagtctcgagcagattggagcattggagagaagaaacctaaattatcaggcgaagataggccttctatgacagatttgagtggatacagttttaagcgagaagaatttgatgttgaatatgacaatgatgcagaacaagtgttggctgatatggaatttaaggacactgatactaaagctgaatatgcaatgaaactgcacgtgctccatatctactcaaaaaggtaaccacagataagtggatgaatattattgatatgggttatgtgattgcatcaaggtatagcaatgaccatcctgtttgttaattttttttataacatgtgttatgaacatttgaatgtgtatttgtctttgtaataggtatttctaagcaatggttgtctcatgttgtcaacaactttgttatggtcaacacattgtgattatcaagcaaaacagtggcctactccttatattagttgaatgtaccagtatactaattacatgaggttgatcacacaacatgttgatttaagagaagattgaacattttgttattgtttgaataacttacatagttatgacaacatggataatgcatgtaacactttctaatc

SEQ ID NO: 820 - DNA, 2666 bp, Glycine max
tgaacattgactctaactacctgtgacagctacaaccttctatttctcttttattaacacactggattgcaccagcaaaacggctggaactatctgtatccatcttataattagtcccccttcatcaagaagatgaacaaaagaagaatgttttcttaccgtctttattacttattccttgtcaccttgtgaaagcttttaagctaaaaatacaacataccctctatcataaatgaaacattaataccaattgatgttacacgtgtatagtagtctatttgtgacagttagtttttttttttttttgagagagagaaattgatgacagttagttagttataagggtttgggaattctcttgggatataaattgaaattccctgcatcaactcatcgtaatatcaacatttcagtttttcccttgttttagatttattcagatggtatcagagctccaattcaattggagctctgcggtgcatagtgattttgatattcgatcgtctttctttgacgcctgatctccatctccaatcccattgttgatctctaggataggctctgataccttcttagaatttgggtttgagcctaactcaatcccacaaaaccggccatatcactagtttaggtgggatctccaacaattattatactcagaaattgaagctggttcaggatttgaaagttttaatggctttgagatatatttatagctatgctcataagttgaacagatttcctggtttggcaaggaaggcaatatggaaggttggcaaagaggatccaagaagggtggttcattctatgaaagttggtacggctttggtactagtttctttgttgtatctgttggagccattgtttaatgggatagggaaaaacgctatgtgggctgtcatgactgtggttgtggtgatggagttcactgtaggggcaacattgtgcaaaggactaaatagaggattggggactctcttggcaggatcattggcatttcttattaagtattttgcagatgcccctggtcggatttttcaagcagtatacattggtgtttcagtttttatgataggagcattaactacttatgtgaggttcattccctctatcaagaagaattatgactatggtgttctgatctttcttctcacctttaatttgataactgtatcaagctaccgcgttaatgatgtctgggactttgcaaaagatcgcatatccaccattgccataggatgtggcctatgtcttctgatgagcatattggtgtttccaaactggtcaggggaagagctccacaacaacaccatatcaaggctcgaaggcttagccaactctatacaagtctgtatcacgggatatttttatgattctgcaaaacaagcaactgaaggtgattcatctgagaatccaatttacgaaggttacaaggctgttttagactccaaagtaaaagatgaaacactggcgtcacaagcaagctgggaaccaagattctcaagatattgtcacagaactccgtggcatcaatatacaagagtgggagctgctcttcgccaattcagttacactgttgtagcactacatggatgtctacagtctgaaattcagacaccaaagtcaattagtaccctgtacaaagattcttgcatcagacttggagaggaagtgtcaaaagtattaagggaactggccaacagcataaggaacaaacgtcaattctcccctcaaacactctccaggaatctaaaggatgcattacaagaccttcacagtgccttgaaatcccaaccacaacttgtactaggctcgaggaatggtcgaactcaaacccctaaaaccgcagttcaagcagttccacatccacatcctgaccaaaagcttgaagaggacaccaaattctcattctcaagtgttaggaatggttcacgtggatccggatgtcaatccgtagagcactctcgtgaactgacaaggaaggttttaaggccacagatgagtatgagtgccatcattagccttgagttctcagaagcattaccctttgctgctttcacttctttgcttgtagagatggtggctaaactggattatgttatggatgaagttgatgagttgggcataatagcacattttgaagagttccaaggtgatgagattgtcgtgacttgtgaaaaaccaaacatcaataaacctcagaatgacttgccttcttatggagcagagtagttagtatagaatccaaatggagtactggagcatattcttcgttgcaattgctgcttatcatcccatggcatgcatgcatacatacatatatatacatacattctagtgcgtatgtaaaggaacttgctagtcttcttacatggagaagagtgcacgtaaaatgcttccacaataagttaccctgaattgcaaagtgagctccttggtttgttatggctagcttactttgattcagttacattacctatggagccttgtgcacatggaagagttagatatatacatcttggtagatgattttaccttgtggatttgaggattgcttggagaacaaatctcaccaatgtaagttaaaaataaataaaagattatatatattatgagttcaaagtggtatgacaaacacgccacttgaattaaaaattcacttcctc

SEQ ID NO: 821 - DNA, 1572 bp, Glycine max
cttctctttcattcgttcgttcaatgtttactgctgactggcggaacatcaaacagcaacataatcctcaactgggaaaatttctctgcacgacatgtctgatgaacgagcagtgcatcctgattgccggaatgctagtaacccttatcatgaatgtagtgattactgttttagagtaatagctgaagccaaaattaggtcacaacaacaggaatcagaagttggacaagctagtggtggaaacaactctaagcaagccatcccagatgaatcctatgtggaaaaggaaatacacaatggcagacccgatcttgaagaaaactctgatagtgatcctgaccagcctgctgtgcaggaagcagagcaagaggttgactacacaaaactttctgcgagacagaaaaagtggatggagttgagatccaagatgcaagaagcaaaaaagcgtaatcaaattgaaatagctgctgagaaaaagaggatggaagctccaaccgagtctaggggtgtttctaaacagaagtggctcgaggataggaagaaaaagattggaaaacttcttgatgcaaatggattggatatgacaaaggcatatatgcttgacacacaggaggcagcagaagaaaaatacaagaaatgggagaaggatcctgctccatttgggtgggacgtctttaatcagaagacattatacaatgcatacaaaaagcggaccaagaatgttgaagtcgatgtagaagaatataatagaatgaaagaagctgatccagagttttaccgtgatgcttcaagtctccagtatggaaaggcaccaaaaatctcagaggagaagattgataggatggtacgggagctaaaggatagggatgagaagcgcaactcttttagcaggagaagacgcttccatgaagagaaagatattgactcaatcaatgaccgtaatgagcatttcaacaagaagattgagcgagcctttggtaaatacacgctggagattaaaaataatcttgagcgaggaactgcattgcctgactaaggtacttatgtagtgatgtgttttatttcacactgtcctgatagtgataagtttcagtggtggattgcactttttagagtgctttttaatcatgtaatactatagtctaatattttgcaatgcacatggagcattgcggagtcatttcgaacttcaaacattatatgcttgcttgagatatgggttcttcttagaggtactctttccagtcattatgtagatatggaatttatacctccccacgtatatgtaagtctgagtttgatcggggttaggtttttttccctctcctttcatttgggatcgtgatctaatgcatttgggatttaatttgttatcacttttcgtagggctctaaaaattgtagttaactcatttgaattgatggaaaggagtaggaatagaatgaaatttaggctttgtttggattgaagaaatggcatgagatgaaggaatgaaatgaacttttaattagttctattgtttggattacttaaaccacaatggaatcaaaaagagatcgaacatttcctttc

SEQ ID NO: 822 - DNA, 1161 bp, Glycine max
atgctctcaccttgtgcttccatggcaaaaccaaagcttcacttgctgtcctttctcttctgcagcatcttgctaagcttcttccactgcacattttcactgatcaacccagaggatgagcccagctggactgacatggaaactgaagacattaacattgtaagaacccggagagatacttggaaaaaatgtgactactctgttggaaaatgggtttttgatcaatcttaccctctctatgattccaattgtccctatctcagcactgcagttgcttgtcaaaagaatggaaggccagattctgactatgagaagtggaagtggaagccatttggttgttccatcccaaggtttgatgcactgggatttctaagtaaaatgagaagaaagagaataatgctggtgggtgattccataatgagaaaccaatgggaatctcttgtttgcttggttcaaggagttattccaactgatagaaaatgggtgacctataatggtcctgcaatggctttccatgctatggattttgagacatcaattgagttcttctgggcaccattgttggtagaactgaagaaaggggctgacaataagagaattctacatctggatttgattgaagaaaatgcaaggtattggaaaggagttgatgttcttgtatttgattcagcccattggtggactcactctggccaaacacgctcgtgggattattacatggagggaaatagtatcatcacaaacatgaatcctatggttgcttatcagaaaggactcagtacatgggcaaggtgggtggatcttaatttggactctagaagaacccgaatcattttccgaagcatgtcacctaggcataacaggctaaatggttggaaatgctataagcagaggcagccattacaatttttcagccacatacacgttcctgaaccactggtagtgctaaaaggagtgctaaagagaatgagatttccagtatatctgcaagacattacaacaatgactgctttccgaagagatggacatccttcagtgtataacaaggcaatgagtgaagagaggcagaaagcaggcacaggtctttcctctgattgcagccattggtgcctccctggggtgccagacatttggaatgagatgctcagttcatttatctaa

SEQ ID NO: 823 - DNA, 1598 bp, Glycine max
gaagaaaagtgctacagatatcaattaccacagtctagggcaatgtcaacaagtgaaagtaacatatttccatggtccacaccaccggaagtcatgccatgatgaaacactttttttcaacataaggcccttctaaattacaaaggccttccctccattgggaccattcacattatgctctcaccttgtgcttccatggcaaaaccaaagcttcacttgctgtcctttctcttctgcagcatcttgctaagcttcttccactgcacattttcactgatcaacccagaggatgagcccagctggactgacatggaaactgaagacattaacattgtaagaacccggagagatacttggaaaaaatgtgactactctgttggaaaatgggtttttgatcaatcttaccctctctatgattccaattgtccctatctcagcactgcagttgcttgtcaaaagaatggaaggccagattctgactatgagaagtggaagtggaagccatttggttgttccatcccaaggtttgatgcactgggatttctaagtaaaatgagaagaaagagaataatgctggtgggtgattccataatgagaaaccaatgggaatctcttgtttgcttggttcaaggagttattccaactgatagaaaatgggtgacctataatggtcctgcaatggctttccatgctatggattttgagacatcaattgagttcttctgggcaccattgttggtagaactgaagaaaggggctgacaataagagaattctacatctggatttgattgaagaaaatgcaaggtattggaaaggagttgatgttcttgtatttgattcagcccattggtggactcactctggccaaacacgctcgtgggattattacatggagggaaatagtatcatcacaaacatgaatcctatggttgcttatcagaaaggactcagtacatgggcaaggtgggtggatcttaatttggactctagaagaacccgaatcattttccgaagcatgtcacctaggcataacaggctaaatggttggaaatgctataagcagaggcagccattacaatttttcagccacatacacgttcctgaaccactggtagtgctaaaaggagtgctaaagagaatgagatttccagtatatctgcaagacattacaacaatgactgctttccgaagagatggacatccttcagtgtataacaaggcaatgagtgaagagaggcagaaagcaggcacaggtctttcctctgattgcagccattggtgcctccctggggtgccagacatttggaatgagatgctcagttcatttatctaactatgacattaatagaatgtctatgcaaaatgtatgaagtgttaaacaactcatctagatcagggtttgtttttatcatctagagagcctccaagaaccaggttgtttgagtgttttttattatcaatgttatctgatcaataacactatgcttggatttgtcattctgattttcacaagcagccaaatcaccttttgtttgtaattttaagtaaagattactgaaatgtaaaatgcataaatgtgttatgtattagtaatga

SEQ ID NO: 824 - DNA, 4836 bp, Glycine max
cggttcttcggacttacacacactccacactcacacttcttcttctctccatttctctgactctgagcatgcaattggccttggtctcattgcattctctgggaaaatgacgaacaagggcaaaggaaaaggcaaggaggtcgccggaaaaggttctgccggcaagcgcaagggcgtcttccaggatgacaagaccggtagtggctgcaagagaaacaaccgaagtgtccttcagttcttcgaagacgccgctgacgttgaagagagcgatttcagtgatttcagcgacgacgacgacagcgatttcgatttttctgatgacgaattaaatgccgcgccaagaaggatggacatgccagataagggccagagtagcctcccacgtgtcgtccctaaagaggaaatgttggatgaagaagagtgggacagaattttggaggagcgctacaaagatccatctaggtttatcagattttctgatgagtttggtgatgataaagggatggacccaagttccatacacgagggtgtcgatgaattaacgccaagcatttggaaagtcaaatgcactgttggccgggagaggctttcagctctttgtctgatgcagaagtttgctgacttgtattcattgggtactaaattaaagataaaatctgcattttctgtagatcatatgaaaggatttgtgtacatcgaagccgagaaacagtatgatataaatgaggcatgccaagggattcccggaatatatgttactcgagtggcacctgtaccaaatagtgaggtttataatctgttctctgttagaagtagaacccctgaaatttctgagggcatgtgggctcgaataaaaggtggtaactacaagggggatctggcacaggttgtgtctgtgaacaatacccggaaaaaagttacagtgaagcttattccaagaattgatctacaagccttggctgccaaatttggtgggggatatagtcgccaaaaaatggctgtaccggctccaagattaatcagctcaagtgaacttgaggagttccgaccactcatccaaatcaaacgtgaccgtgatactggcaaggtttttgaggttcttgatggtttgatgctcaaggatgggtatgtatacaagaaaatatctccagattcattaagtttatggggtgttgtgccaacagaagatgaactgttgaagtttgggccttctgaaaacaatgaatcaaatgatttagagtggctctctcagctttatggtgacaagaagaaaaaacgggttataagacctgagaagggaggtggtgggaaaggagagagttcatcaggttctggtgtgggaaatggttttgaactttatgatttagtatgttttggtaagaaggactttggtgtaatagtaggcatggataaagatgatatctacaagattctaaaagagggttcagatggacctgatgctgtaactgttgatcgacatgaaattaagagtgggctatttgatttgaaacttactgccctagatcagcacagtaagactatattggttaatgatactgtcagggtgcttgagggtccaactaagggtaaacaaggcattgttaaacacatttatagagggattgtctttttatatgatggaaatgaggaagaaaatggaggttacttaacttgtaaatctaataagtgtgagaaggtcaagcttgctgttggtgattgcagtggaaaggatagtgaaccgggtcctttagtctttgaagaccaaccatcatcaccaagatctcccttgtcaccaaaaaaaccatggcaagcaagagaaaataaccgtgaatttaaccgtggggacaacaacaacatgtttactattggtcagacgttgagaattaggataggtcctttgaagggatacatttgccgagtcattgccttgcgtcgtgctgatgttactgtgaaactagattctcagcagaaggttcttacagttaaatgtgagcatctttctgaggttcaggggaagagtactgccatttcatcaagtggtgatccagattcaagttcatctaagccatttgatatgctgggtactgaaggcagctctggaggttggctgaatggagtgggaacgtccactggggctggtggatggaatgctggaggggcatcatccactgggggtagtggatggaatgctggaggggcatcatcaactgggggtggtggatggaatgctggaggggcatcatcaactgggggtggtggatggaatgttggaggggcgtcatcaactgggggtggtggatggaatgctggaggggcgtcatccactgggggtggtggatggaatgctggagggccgtcatctaaaagggatgcagggtctaatcattctgctccaagcttattgaatacagaatctacctcaaatccattcagttccaaggaagattctgcttgggaaactaaaagtaattctaataagacctcctcatggggtgctgcagtggataagactggaattgcttctgatgcagatcagtctggtggctggggaagtggtggagggagctggggtcaggcagagcataaaactggaagtgtgggtgatggcaatcagaatagcaattggaatacaaccaaggcttctgaaggggagtcttctggttggaacagtatccaaaagtcaaatgaaacttcatcagctggatggggtggtggcaatgggtttaaaagtggatcagatgaaggaaacttgaattctacttggagtggctggaagtctggatcaagtggagtcaaacaagctgggaacactgctggtacttcagatattgatgctaatcaggatgctgggtggaaaaacaaaccaaataaggatgggagtgagtcatctggttgggaaacaaaaaacaattggaatgctccagtctcttcatcaaatgataaagtggaaaaaggtaatgatcaaggtaggtggaatgcaggaaaagcttcaggtggtttggctgcagatttcagtcaagcttctggttggaaaggggggctgagtgagcacacccaagaaggttctaattggggcgacaagaaatttggttcatgcgatgtatctggtgattccagtggaaatcagggtagtaatggttggggtcagaaaagcaattggaactctggatctaggagtgggaatgagaaccagaattctcactggagttctgggcgtaatgagcctggaaatcaagattccaacttggacaagaaaagcaattggaactctggaaacagtggaaacctggcttccgatccaaaaagtagcaattggaattctggatctggtaattccaatgaaaattccaactggggaaccaatgtcaataacaaatcttcatggggtactggaaatgaaaacaagaattccagctggagttctgggcatagtgatcctggaaatcaagatgccaatcagggcaagaaaagcaattggaactctgggaacagtggtaaccagccttctgatcctaatagcaattggaactctaacaaatcctcttggagtgctgggaacgaaaacaagaaatctaattggagttctggggatcctggaaatacagattctaactggggcaacaaaaataattgcatttctggatctggtgatgctaatcaaaacacgtcttggagaagcaatagcagctggaacactgcaaatgcctcaagcgatgatggtaatgaaggttcaaatgaaaattctgatggagtaggtggtgggaactggagaggtggttaccggggtagaggtggctccgacagagggggttttagaggtagaggttttcggggtagaggagagcgtggcggtttcggtggacgaggggagcatggaggctttggtggccgaggggaacgaggaggctttggtggtagaggtagatcagacagggaaggttttggtggtaggtggggatcagaaggaggacgtggaggccgaggcaggggaaggaacgatcaatctggtggttggaacaacagaagggattctggtgaggatgggccctctgactggaagaagggggcagataatggtggatggaagaatagtaatggatctcaggcttggaaccaggatactggtgacaaggataggcagagctggagccagggaaatgcagataaggagcatcctagctggaaccaaggaagtggaagaaatcagagctggagttcagcaagtggagctaatgataatggatctcaggcttggaaccaggggaatgcagataaggagcatccaagctggaaccaagctggaaataagcagagctggagttcagcaagtggtggaggtaacaataattggaacaacaatgggtcatcgcagactgcagaggctagctggaaaaaatctacaactgaagggaccaatatccagggtggtgggtggaacaagggatctagttcaaacactacttctaaggactggggtcaatcaagtgctgcagacaagggtcaagcatctagttggaaagaagcagcagatggtgcatcaggttcatggggcaagaaaaatgacgggggtgacaaaggtggatggtaattgctttcttgaacgtgctagatgggccaaagaagggaagaattgagttcgggcattttgtaattaatggcaaaccttttttctctttgtaaatccgtataaatctgcgcagagactttgtttttaaattgttctaaacagatctgatgaatgactaatcctctcttccgtgttatgcatgaatgttatgtaatatgcagtgtcgtgttacaatttctaatctgtgattgtatggcttgcagtgcttt

SEQ ID NO: 825 - DNA, 1709 bp, Glycine max
tataaaggcaacgccaacgatgcaagcagagattttttcttacgcacgcagtggcatctatctaagacaggcaccatgtcacttcttaaccagctctttaacagaggcgttttcggcactcgatggtgactgatttcccctttgcttctcagatttaagttttctgattctgattacaatatccgattttaggttttggggatatgtccattatgtttctgtattcccggattttaggtttctcaattgagtctcactcacttttactcatcgtgcgcttgctcaaataacaattgaagtgtttattgtgtcaagttcagtttcaattttgagtccttagggtgggtttcgtaagatattatttaggtatatccaatgttttattggaggaagtgagctattttgatgaaagataacggatccttcttggatggattgttaatatgaccgtctaagcaaaacatgcctgaacctggcaatttcacgcattaagctgctgcaaaacaagagagatatgcaactgaaacaaatgtgcaaggagattagccaattcttgcaggctggccaagaggcaattgctagaatcagggtggagcatatcatacgggaacaaaatacatgggctgcatatgaaattttggagttgttctgtgaatttgttcttgcacgtgtacctataattgagaatcagagggagtgccccacggaattgcgagaagccattgcaagtataatttttgctgctcctagatgttcagatgtaccagacttattgcacatcaagaacttgtttaccactaaatatgggaaagaatttgtctctgcagtatctgaacttcgtcctgattcgggcgtgaaccgcacgatcattgaaaagctttcagttagtgctccatctggagaggtaaaactcaaggtcttgagggagatcgcagaagaatacaatatagcatgggattcttctaaaactgaggctgaatttaggaaaaaccatgaagatctcctgggtggagcaaagcaagttagtgctggagctacgctttctcatactcccagcagaaatggttctaataatccatcaccttgtattacggaaccttctatcaagcctgtgcaagacaagcaagaatataaacaccttgaagctccgagcccttctaacaataattcttcgttggatactaatgaaatcgaacagtcacacaaaaacaataatgttcccgctggagatgctaaaagtgagacaagatttcaatcctctgatgtactggagaaggcacgggctgccattgcttctgcggatcgcgcatctgcagctgctcgtgctgctgctgcactagttcagagtaattttggatcattgaagctggaaggtaaataaaccttcacatcgatgaaaatgctgccctcccaggatcttaatgctggaaaaaaaaatgttaagaactaaatgccaaaggagaaaattatgttctttgttgcggaggtgacagcttcatacagtgattctatgtaataagaattgtgccgtacttcattgtacattccataattaatacatgtatatcattgtaacggaacggaatactgaacagtgtgaacttttctattttctagatcttcctgattcttgcaactgcggatcgtagtgtatcatgaacttatagatgttatttctaagtaatttaaacatcaattttacccaggaa

SEQ ID NO: 826 - DNA, 1383 bp, Glycine max
cttctcttttcttttatcgtttgtgaaatcacgaccatgtcgtcgcagaatcagaataggtcgttggagcaagctggaccctccggctccggtggacaggtgggagtgagagtagtgaattggagtggttccgataggctttgcataagccctaagcgagatcacaagcccgaaaactatgacgaccttcaattcgagttcaatcctaatatcttcgcctctctcgagcactatttgcctcctcatatgctcaacctctcacgtgatgttaagcttcactacatcaggaacattcttcttcgctatttgcctgagaatgaccgcatttggtttgttattctatgttcgattcaacagattcaaaagctgagggaatacaggctaaagatcatattgaattatccaccgctgcataaggagatatttactatggatgctgagagctttttcgtaccatcatttctcagagcaataaaagaaaacacagaagcgagttttagaagtataatggctgaaccttgtaaaggagtttatacatttgaaatgcttcaaccacaattttgtaaaaaactgatgtctgaggtggatcattttgaaagatgggtccatggtaccaaactcagaatcatgcgacctaatgcaatgaataaaaataaacatggtgttattcttgatgattttgcctttgaagccatgcttgacagatttatgtgtgatttcatacaacctatatctcgagttttctaccctgaacttggtggatcctcactggactctcaccatggttttgttgttgaatatggaattaataaggatgtggaacttggcttacatgaggatgaggcagaagtcaccttaaatgtttgcttgggaaaagaattttctggtggagacctgttcttccagggtgttcgatgtgatgcacatgtaactacaaatacgcaaccagaggaggccttcaattattcccatgtcccaggacacgcaattcttcatcctggtcgtaaccggcatggcactagacctacaacatctgggaatcggatgaatttaattctctggtgtagaagttcggcttttatagagttgaagcgatatcaaagagatttttatagctggtgtgcagaatgcagacgcaagaaggcagagagagtgcgtttgtcagttgtggccgccaaacaggaattactaaagagcgaaatataatttgcctcatgaacttgcacatgtgaattgtgcttgtatagttgattcacatcattgaacttcttttctgtttctagattctgtattatttttaacgaaatgaaatatgattgaagttgcaagttataagcatgatgaacttgatacccgaaccaatagacatttttttaaccaaaa

SEQ ID NO: 827 - DNA, 2906 bp, Glycine max
ttgcctttgatcagaattcagaactaaggcattcatttaatgagaggttcatttactatactacagtataggagtccgcgttattgaagggaagatgcaaaagagaaagctaagtgtcagttttggcgtgcacaactcagcaacgtgcaccccagaaattgaatggtctccacacactttctcacctcaaatcaaagaccaaaatgcattaggaaaaagtgtaacaaagtggcaatcttctcttctttaaggcttgctaaaactactataacactttggcatttagcgtgcttacagtgttacacagacagatgcatgagaaaaaaagaaagaaagaaaccatatcagctcattctctgattaattgttctttttcttttttttttacttttttcttttcttgtttttctccttcagctgcttctctggcttccgtggctggctgcctctgttgaaagttgaaacttgaaactcagtttggtgctcctgactcctccatacacaaaacacacactgtcatgcacagcaacaacacctgttgcactgcaccatttgtcttgtccatcttctattgaactcccactgtgtgtgactctcttcgctcgtttgagtcggcatcatctgagaagaagcagatcttatattgtcaagatgaagttcatgaagcttggttctaagccagatacctttcagactgatgggaacaatgttaggtatgtggcaagtgagttggcgtcagatattgttgttagtgtaggggatataaagttttatctacacaagtttcctcttctatcgaagagttctcatatacagacattgatctccctcaataatgaagaaaatgtagatgaagttcaaatttctgacattcctggtggtgcaaatacctttgagatatgtgctaagttttgctatggcatgactgttaccctcaatgcttacaacgtaatagcaactcgatgtgcagcagagtatcttggaatgcatgaggccattgagaaagggaacctcatttacaagattgatgttttccttagctctagcattttccgtagttggaaggattcaatcatccttcttcagacttcaaagtctatgttacccttggttgaggacctaaaggttgtcagccattgcattgaatctatagcaaataaggcatgtgttgatgtatccaaagtcgattggtcctacacctataaccggaagaagcttccagaggaaaatggaattgagtcaaaccagaatggactcagaactcgactggtgccaaaagactggtgggttgaagatttatgtgagcttgaagttgatttgtacaagtctgtgattacaaatattaaatccaaggcagttcaatctaatgaagtaattggcgaagctttgaaagcttatgcttatagaagattgccaaatttcagcaagggtatgatccagtgtggggatgtgtcaaagcatcgtttaatagttgaaactatagtgtggttgctgcctactgagaaaggcagtgttccttgtaggttcttactcaagttattgaaagcggccatttttgtagaatcaggagataggactaaagaagagctggtaaagagaattgggcagcaactggaggaggcttctgtaagtgatattttgattcaagcaccagatggggctacaatctatgatgttagtatagtacagaacattgttagagagttttttatgaagaatggcaatgctgagattgagtcagttgggggtgatgaacttgaggggataagaaaaccagggattttatcagatgcttccaagctgatggttgcaaagctcatagatgagtaccttgctgaaatagcaaaagatcccaatttacctttgccagagtttgttaatcttgctgagttagtgtctagcatctctcgtccagctcatgatggcctttatagggctattgatacatatcttaaggagcaccctgcgatcaacaaaggcgaaaagaagaggatatgcaagctgatggattgtagaaagctatcagttgacgcgtgcttgcatgcagtgcaaaacgagagactaccattgcgtgtagtcgtgcaggtactatactttgagcagttaaggactgctgcatcatcaggtaccagcactcctgacatacctagaggaatcaaagacttgaacaatgaatccaatggaagctcaaggtcagggacaactaacccagaagacgagttggatgctgtggccacagctgaggagctgaaggcattaagaaaggaacttgcatcattgaggctgagcaatggagttggaaacaatgacaaagatggagacaacaaacccagcatggacaaagctgtcatgagcaaggtgaaagggttgctcaagtcaaagaagtctttcattaagatttgggccagtaaagggggacaaggtgaaaatagtggctcagactcatcagagagtatgagttctgctaacccagaagaagccaaatctactccatccagaaataggaggcattcagtttcttgaaagtagtagtttggttcattttgttggcttttctattattgtttcttttctttctttctttttactagtttcaccaagacaagattccccaacactagtggtttatcttttctaaattgagtagagtacatatagtttaaaatagtagaattgtgaagaatggaaatcatgtaatccaaacatctattctatcgaatagtagttcaaaccgccctttgcactccattggaattgaaagctcaccccatttcttagtaaccattcaaggaacctgatggtataaacagatagttaccacttaccactgtaatcataacagcagttacttactgtcatgtgttttggtgaaaatctgacaagacctcagggtctgttatttcgtg

SEQ ID NO: 828 - DNA, 1838 bp, Glycine max
ttgaatgttgatcgtggcttcataccttttccattgtgtttttttttttcttcctgaaaagttgtgatgtggattcatacctgatacagagtgcaaatgaatttttgttgcccttttgaagatagttagacaaactattttttggggggaaggttcaagagcagtttcatcctttggacagctatttggtttgaattctcctctcgttgcctgaaagttaaacaatgtcaggtacaaggtttctcttcagtaatgacatccttttacgtgcctcagatgcccctccagtcaaaggcctccttgaaactcatccgggtgcatacacaacatcacgcactcacaacaatgcttcatggttgttattttgggagagacacatgaaaagactttcacaatctatacaaattctatcgaatttggcgccagagcttctatttaaatctaataattctgcaattctgttaccatcatcagcaaccttgccaatatggcaacccaccgttcagatgcttgttaatgattcggtgtgcaaagtcttgccgattgcattgaaagagaggaatgattgtgaggaattggccattacaactcttgttagtggtaatttggaggaattaaatgcatgtgacaccttcagtgaggaaagaatgagtaaaattcttgatgtgcatgtgcatgttgagacttatgttcctcctacatttggtatttggggaaatggtgtacatttggctgtagtgggctatgggaggaatgttgcagctgctaaatattcagattgggtaaggattaggaaatctctggaaaagctcaggcctccctcagtgacagaactgttgctgtctaatgatggggatcagatcctcgaaggttgtgtgacaaatttttttgttgtttgctgcaaggaaaggaattcaaatgatgagaaggccctgtgtgattatggaaataaatactcttttgaagtacaaacagctccgatcagcgatggtgttcttccaggaacaatacgccaactagtgcttgagatatgcaggagtgaaggaattccatttcgagaagttgctccatcatggtcagaatgtgaaatctgggaggaggcattcatcacaaatagcttgaggcttttacaacatgtggatagtattcaggttccaacagaatggcaatcagcccattctaaaacgtggaaggatatatcatggacaaaaaagcaatttcaggtggtatatttctactggtgctgcaattaattcactttttttttttttaatgattttctcaactcgagttgcagggtggacctgggatgatcacaactattatccaggaaaagattatggagaaagcaattctggaagggtacccaataagtaacatatatgcaggttgaagatcccactgagttgctaatatgctgggatgaaacggacaatagttgagcatctagttctccccttctttgggcttatacattggcaattccatattttcttagctcatcaaatagatgacaacagtgtgatctcttggaagatggccgttttcttgaatctgaagtctgaacaacttcatgaataagccagagaccaaatagagagaattggaacaaaaatagagaaatcaagttcttatactgatgtctagcaggatttatttactccttcatacaccacttgtgtgaacattaatatcagcttatatctgtttatatggaaaatgtcttccaaaatcttttgctgaaaaaaaaaggaagcaaatgaaactaaagctaatttcccatgaactggactccgtcacatatcagagagcatgttattgtgaatatctaagggaca

SEQ ID NO: 829 - DNA, 1264 bp, Glycine max
aaagagagagaggtatataagaggttagggtttggggttttttgggtgccattgttgctgtcatcatccgcagctgctgttattcgcaccgcaaacaaacagtgagccatggccgtcggaaagaacaagcgcatctccaaagggaaaaagggtggcaagaagaaggcgttagtatcttccgtttctattcccctttattctgtttcatttgtgtttttgcgttatcattcaaaattcagtggttttgttggtttttgtatgaatgtgcagagctgatccctttgccaagaaggattggtatgacattaaggccccttctctttttcaagtgaaaaatgttggcaaaaccctcgtctctcgtacgcagggtaccaagattgcttctgaaggacttaaacatagagtgtttgaggtctccttggctgatcttcaaggggatgaggatcatgcattcaagaagattaggttgagagctgaagatgtgcaagggaagaatgtcctgacaaatttctggggaatggatttcacaactgacaagctgaggtcattggtgcgaaaatggcaaactctaattgaagcccatgtggatgtgaagacaactgataactacacattgaggatgttttgcattggatttaccaagagaagagctaaccaagtgaagagaacctgctatgcacaatcaagccagattagacagattcgtaggaagatgagggagatcatgaccaaccaggcaacatcctgtgatttgaaggagttggtccgcaagtttattcctgagattattggaaaagagattgagaaggcgacatctagtatttaccctctgcagaatgtgtttgttcgtaaagtcaagatcctgaaagcccctaagtttgatcttgggaaactgatggaggttcatggagattactcagaggatgttggtgccaaggtagacagacctgctgatgaaatagtggcagaggaacccactgaaattgttggagcttgatttcatgatgcattcagtttgttctaggttttctttttcttacgttatcattgaaaattaagttacaaacttctgtccaatgtttctgtgtaagccgagtgacacagttttgtttagacaatcagaagacatttttggcgcgtaatatatctgggttttgttcagaacccaaaatcagatttgcttgcttatataatcacattatattattatgtattttctattacattatcgacttgtatattttgtttcgtggatttcaaattc

SEQ ID NO: 830 - DNA, 2378 bp, Glycine max
atgcagtaccttggtcaaaatgaggcctctctagcatgccctcatgggtgttgccctacttccttattgttcaaccctccaccaccaccaccactacaaactcagaacacaacaaccaaacctaggaacagttctgctgagtgtagacacagctttgcagcaacaacagcatcctcaatcttcccaaacaccaaattcaccaaccatgagtccctcccttctctgcatgagtcattcagtgagttcaagaaagtgtaccctcaatactccgagactgatcaagtggaccatgtgagagacaaagaatattaccacctctctttctccaaccaatcatgccttgactacattggtattggcctcttctcttattaccaacgccaacaccaccatgacacctcaaaaacccaacttgcatcttcttcaacacccccatccccaccccaatattctgataatattcccttctttagcatatcctacaagactgggaatttgaagacactgttgcttcatggggggcaggaatcagagtttgagtctgcaatgaggagaagaataatgaagttcctcaacatttctgaaaatgactacttcatggttttcacagcaaacagaacctcagctttcaagcttgtggcagactcatatccattccaatctagcaagaagcttctgacagtttatgactatgaaagtgaggcagtggaagcaatgattagctgctcagagaggagaggagccaaggccatgtctgctgaattctcatggcctaggctgaggattcagtcaacaaaactgaggaagatgattgttagcaagaggaagaaaaagaagaagaggggtctctttgtgttcccacttcactccagggtaacaggagcaagatatccttacctgtggatgagcatagcacaggaaaatgggtggcatgtgttgattgatgcttgtgcattgggaccaaaagacatggacagctttggcctctctctctttcaaccagactttctcatctgttctttctacaaggtctttggagaaaatccatcagggtttggatgcctttttgtcaagaaatctgctatcaccactcttgaatcctcatcttgtgcaggaattgtgaaccttgtgccagataggttgctacttcatccatcagaggataaggattcttctaagcaaaaaccattgtctatcttacaagaacaagacctatcttccttgagttctttctctggtcggatacaaacctcacaagctataaaagttgaacaagaattatctgagcttcagatcatagcggcacctgcaaaaccaaaacaaggttctggaagagtggaagcaaaaggaccagttgagagccttcaaagtaagaaagcacaagatggtagtgagaatgggggatttaacattgattgcaggtgtttggatcaagtggactctttgggattgataatgatcaccaatagaacaaggtaccttataaattggctggtgaactccatgatgaagctgaagcaccctaatgcagaaggggttcccctggtcaagatttatgggccaaaggtgaaatttgataggggacctgctttggcattcaatgtgtttgattggaaaggtgaaaaggttgagcctgtccttgtacagaaacttgctgataggaacaatatatctctcagctatggatttctgcatcatatttggtttgcagacaagtatgcagaagacaagggaaaagttctacagaccaaagaaggaagagtccaaggagtaatcaccaacaagaagaaagatagggataagctaggagtaactgtggttactgctgcattaagcttcctggctaattttgaagatgtatataaactatggacttttgttgccaggtttcttgatgctgattttgtggagaaggagagatggagatacacagctctcaatcagaaaactattgaagtttaatacaataaatttcacttcattcttctggattgtggaacacagaagactcaagagtgtggattcggatgaggatttcaagttgagaaaatagttaaattatccaatcattttgttgattagttcataagtcatatagacaattcatcagtcaaatatatttgattttacttgcttcttctgttttttccttgcatgcacattcgggcagatccacaactatacactggacactgaaagaaatcacagctagaaaattgaatatacccttctaattgttcccaaactgacaaaagtaaatcgaactgaatgaataaaggaagctgtatccagagagagaaagagattgagagagaagaaaacgaaaaacagcttatggaatgatcaaagacagcttaagctttattttccagtaagta

SEQ ID NO: 831 - DNA, 2963 bp, Glycine max
acaggagctaccacaaaaggggtttggaatctaacttggattcaaagcaaaagccaaaaggcttctttctttcagttaggaaaaaacaaacaaacaaatatctctagtttagagaagaaaagaaaaccattgactttctcattaccccccacagtcactcaaaggaaaatggagggccccagtgagataggtctcataggggaaaattttgatgctggtttgatggggaggatgagggacgatgagtacgagagccgttctggaagtgataactttgaaggcgcatctggtgatgatcaggatggtggtgatgatcagccacagaggaagaagagataccacagacacactcctcaccaaattcaagagcttgaggctttctttaaggagtgccctcatcctgatgagaagcaaaggttggatctcagtaagaggcttggcttggagaataagcaagtcaagttctggtttcagaatcgacgaacccaaatgaagacccaactggaacgccatgagaacataatgcttaggcaggagaatgataagctcagagctgagaacagtttgatcaaggaagccatgtcaaatccagtgtgtaacaactgcggtggccctgcaattcctggccaaatttcatttgaggagcaccagattagaattgagaatgccagactaaaggatgaattgaaccgtatatgtgtcctagcaaacaagttccttggcaagccaatctcatcattgaccagtcccatggccctcacaacctcaaattctggtcttgaacttggtattggaaggaatgggattggtggttcaagcactcttggcactcccttgccaatggggcttgatttgggagatggagtgttaggcactcaacctgcaatgcctggggttagatcagcattgggtttgatgggaaatgaagttcagcttgagagatctatgcttatagatcttgcattggctgccatggaggaattactgaagatgactcaggcagagagccctctttggatcaagagtttggatggtgagaaggaaatctttaaccatgaggagtatgcaaggttgttttctccttgcattggtccaaaacccgctggctatgtaactgaagctacaagagaaactggaatagtaatcatcaacagtttagcccttgtggaaactttgatggacgcgaatcgatgggcagagatgtttccgtctatgattgctagagctatcaacctcgatgttatatctaatggcatgggtggaacaagaaatggtgctctacaagtgatgcatgctgaggttcaattgctttctccactagtccccgttcgtcaagtaagattcatcaggttctgtaagcagcatgcagaaggtgtatgggctgtagttgatgtttccattgagataggtcatgatgctgctaatgcacagccatccattagctgtagaaggcttccttctggctgtattgtgcaggatatgccgaatggttactccaaggttacttggcttgagcattgggagtacgatgagaatgttgtccaccaactttatcgcccgttgctaagttctggtgttggattcggtgctcatagatggattgccaccctccaaaggcagtgtgaatgcttggctatcctaatgtcctcttccatttcaagtgatagtcacacagcattgagccaagctggtaggagaagcatgttgaaattggcacaacgcatgactagcaacttctgttccggggtttgtgcttcgtcagctcgcaagtgggacagccttcacattgggactcttggtgatgacatgaaagtgatgacaaggaaaaacgtggatgaccctggtgagcctcctgggattgtgctcagtgctgcaacttctgtttggatgccagtgtcacggcaaaggctgttcgactttctgcgtgatgaacggctgagaagtgagtgggacatcttgtccaatggtggaccaatgcaggagatggtacatattgccaaaggacaaggacatggaaactgtgtttctcttctccgtgctaatgctgttaacgccaacgatagcagcatgctgattctgcaagagacatggatggacgcgtcatgctcagtggtggtatatgcacctgttgacgtgcaatcactgaacgtggtgatgagtggtggagattctgcatacgttgcactcttgccttcaggctttgcaattcttcccgatggccactgcaacgacaacggctgcaacgggagtctgcagaagggccgcggcagcgacgacggcagtggcggaagccttctcacagtcggtttccaaattctggtgaatagtctcccaacagcaaagctcacagtggagtcagtggacactgtgaataacctcatctcctgcaccattcagaagatcaaagctgcactcagagttgcatgatgccaacaacaacaacaacaacaaccattttgttaatgcagtaataatatgcaaaagttaagttaccttaaaattattattttgtggtcttttttaattttttggtttctaagatgaatattattcggagaggggttatataattcggttgggtgtataggatttataattatatagagtagtggaagaggctgaggcagaaagggtcgcgtaaggaaggtttcgagtcaagaacgaaccgcgatggaggaacttgaattgtgctgtttgcatttgcatgcagcttttctctgctcatagtggttcgggtattgactcgttgacctgcgagttagtctcagtgctcttgtttagataagatgacagaaaaaaaaaaaacaaatgtgcgtgtgttactacttaaattattactagtgcccatccatccgatacagttgcaaattgctgaactaatgtattttggaattatgcatttttcatattttagtagtctttttatattttggctcaagaatgacttttcttttttggagggg

SEQ ID NO: 832 - DNA, 3546 bp, Glycine max
agaaatcgttgggcgacgaaagagacaagaagatcgcgcggaattcccaggtgcggtactcaatgggaaagcaaaagcaacaagtgatttcccgcttcttcgctcccaaacccaaatcccctcctcctcctcctcctcctcctcctaaaatctccgccaccgtcactttctcccccgccaaacgccgccttacttccaacttcaccacctctcgcaaacaccccaaactctccccccacacccaaaaccccgttcccccttcactccaccaacgcttcctccagaagcttctcgaaccttccacccctcaacaacaccccgcttcctcttccaaacccccaacctacactcccctcgaacagcaagtccttgacctcaaagccaaacaccccgacgtcctcctcatggtggaggtcggttacaagtaccgtttcttcggccaagacgccgaacacgcctccagagtcttgggcatttacgcacacatggaccacaacttcttaaccgctagcataccaacttttcggctaaatgtccacgtcaggaggctcgtcactgccggctacaaggtcggcgttgtcaagcagaccgagaccgccgccatcaaggctcacggctccaaccgctccgcccccttcgagcgcggcctgtccgcgctctacaccaaggccacgctcgaggccgcgccggacttggggggagcggaggatgggtgcggcggagagagcaattacttgctctgtgttgtggagaagagtgttttggatgagaagggtggtgttgatgcgaggattgggattgttgctgtggagatttcgaccggggatgttgtttttggggaattttgtgatggttttctgaggagtgcgcttgaggctgttgttctgaacttgtctccggctgagttgcttctcggtgaccctctttcgaagcaaacggagaagttattgctggattttgctggacctgcctcaaatgttcgtgtggagcgtttttcacgagattgcttcattgatgggggtgctcttgctgaagttatgaccttgtacgagaacatgcacatagacagtccatcagattcaatacaaagcaatgatttgactgagaacagaagtcagaagttaataatcaaggaggtgatgaacatgccagatttggctgtccaagctttggccttaactattcgtcatttaaaggaatttggttttgaaagaattctgtgttcgggagcttctattaggcctttctcaagcaatacggaaatgaccctctcagccaatgcacttcaacaactggaggttttaaaaaataacagtgatggatctgaaatcggttctttgctgcaaattatgaatcgtactcttactatatttggctccaggcttcttaggcattgggtatctcacccattgtgtgatcaaaccttaatttctgctcgtcttcatgctgtatctgaaattgcacagtccatgggatcttgtaatagtgtgaagaatcttgtacgtgttgaggaagatcctgacgtagcaattgtgcaacctgagttagcatacacactttcactggttttgacaactcttggccgagcacctgatatacaacgtggaattactagaattttccattgcactgctaccccatctgagtttgttgcagtaattcaagctattttgtctgctggaaaacagcttcaacaacttaacataggagaggggaataataacacattgcgccctaatctgttaaaaaagttaattttgactgcttcctctgacagtgttattggaaatgctgcaaaaatgttgtcatctttaaacatagactctgctgatctaggagatctaacaaaattgattattgcatctgagggacaattcccagaggtcattagagctcgggaggctttcaagctggcagtggaacaactagattcaatgattgacttctatcgcaaacagcttggaatgaaaaatttggaattcattagtatttctggaacaacccatttgattgagttatcaactgatgtaaaggttccttcaaactgggtcaaggtaaatagcacaaagaaaacaattcggtatcaccctcctgaagtattgacaacattagacaagttatcattagcaaaagaggagctcactgttgcctgccgagctgcctggaataactttcttacggacttcagtaaacactatgctgagttccaagctgctgttcaagcactagctgctttagattgtctgcattcacttgccattctttcaagaaataagggttatgtttgcccagtgtttgtagatgatcatgagcctgttcagatacagatttcttctggtagacatccggttttggagactaccttacaagacaattttgtcccaaatgatacaaacatgcatgcagatggagagtactgtcagattgttactggacccaatatggggggaaaaagttgttatattcgccaggtggctctgattgttataatggctcagcatcatcagcaaaattgcatgtcctggataggatctacacccggatgggtgcatctgacagtattcagctagggagaagcaccttcctagaagaactaagtgagacttcgcatatactcaatagttgcacagaacattcactggttatcattgatgagcttgggagaggtacaagtacacatgatggtatggccattgctcatgcgacattgcattatcttctgaagcaaaaaagaagcatggtcctctttgtcactcactatcccaagattgccagcctggcaactgaatttcctggctctgtggcagcatatcacgtgtcacatctgatctcacatgatgcaagtaaaaattccaacttggatcatgatgtcacttacctatacaagctagtacctggtgtttcagagaggagttttggatttaaggttgcccagcttgcacagttaccatctcattgcatcagtcgagctattgtcatggcttctaaattagaagcactagtaaacagtagaatacatggtagatcaacaaaggagctattattggacacgctggtgattggtcaagaaaaagaacagcttatggctcaatcacttgatcgtccacataaagagtttgatatggcttacaaagatttctatttaaacttaaaagctgcaacagaagatgatgactgggcaaaaagctttcatctattggaacatgccagaagcattgcaaagaaattaattggcagatcaatgcagtatgtgtaagtgaggattacatgcagaagcagggttcgggtcttctccagcgttgtaggatgtagataaatattttgcttaaaaattttgctgattagtttaagttaaaccttccaattttttgctttacctgcttcctgcctcgtttatatttttttaatttcggttacgcttgggaatagattttaatttccgccatgtatgttgatgtcctaatttgagccaacggatgtaaaatcaatgttgacaccataaattctatgttacatcctttgaaatgtttatttcagccgttaact

SEQ ID NO: 833 - DNA, 1424 bp, Glycine max
agatttcatctatttgaagggacttatttgaaaatttttgcatagtattcaaggaaaagaaaatgtttgcgtgtgtggttgcagccccacccttctatgtagttccatcccggggcactgagctttgatcctaacagatgctgcaaactgctaaaaccccacagttctaggctctagccaaatcctagtgatttgatcatgtattattcaattagctatcaggggctctgaaaatagggtacctgtgccattggatacttccaacagtcaagaagtaaagaaggctgtggacaaaaaatccctgtctatgctgaacaagctatattacttttgtactcgtcgaccaaaggcacatgaggaattgagtgtcttggttagcatgtttggcgtttacttaaaccgcaaggatggctataccatgaaaccaaaaggatgggtcaatgatatggtgattttagctgctggaaagataatgatggaagaggagaaggcaacaaatggggttgtcactcgtcatatgtttagcccacaatttgtgaataaggtgatatgcgatttaaatcaatctaatgaagatagctacaagccttggtgtattgaggatgtatctctattcatcttgccgagtaaactgggttatgatattaatcagtgcaaattgatttttgcaccaactttgtttgaggagcattggtcttgttatgcatttgagcccaaggacaaaattttgtatgtgttagattcgatgcatgataaattctcaaccagaaagaagaacttggatgatgcaatgaaacgtcgttttgaggagctgctggtattgatgaatcctggtttgaccaaagagaatgcatcaataacacttcttcgcgttgatgttcctaggcagcaaaacattcatgattgtggcatctatgtgctgaaatacatggaaatttgggatggatcaataaaatggcaagacaaaaccatgcctgattatcaacgcaaagaaatcttgaagtttcggcaaagccttatatgtggatgggttcaacatcctaaaaatgaggttagagaagagcttttgaaggctgcaggactatgggggaaattatgctgactgacattgactatatcaagttaacacgtctactaagagatttcggttatacatagttaatttttaaaaaaatgaaatacagttttaattcttcatctggggcacccaaacttaatatgaaaatgtaacacctagttcacactttacttgtatcttgggcatccaaactttaatgccctgtgtactccaacacgaatatactagtttctataaagttgttacacatttttctcagctggtttgtatggggtaaatataataacttccttcctatgcttttctcaccatttactgtcttttgggttagtttactgtgatttgt

SEQ ID NO: 834 - DNA, 2131 bp, Glycine max
gcttaagccttgtctgatatttaagcaaatcattagtgagttgtgacttaatcctgaatttagttttcaaccagaccgtccttcgtcagttaactatgggctaatcacaattcaggaagcccaaaactattaaagaaaccgacaacacaaaggatttgcagaaagtgcagctacttagttccattttcatcctctctccattaactttcagtcaaaacaaaacaaaacctctttaggtgtgaaattccacgtgccaaaatcatctccgaggcaccaacatcggcagccacatatttctttatttattggtacaatattgtttttttcttcttcttcttcttcatttttcattaacatatatttctttttcgaagaatcaaaggtagaatctacaatattaaaaaaaaaactgtataagaaattaaaggtagtggtagtggagtgtgtgtgtgtgtgttaattatgtgtatgcatggtggaagctagagtaatagaggcgcaacatggtcactgtttctgtgggggctatagccagcttctcatcataaggaatcagtatataaaacacctgctttctaacggtggcgcaccagaggggtttaggttcaggttcggggaagttcttcgcggcggagcaaggcggcgatgaggaagcggaagagagtactgaggtaggttctgttccgagccatgtggtgtcagcctctgcagcttcggcccaaaccaatcagtgggtgccgcggggaagtggttttcccatgatgtcacgttttatgcatgcgccttctcccgttctgtcttcttcgcatcctcatttgggagttggccacaagagagagcgtgaagatgacactggcgctggtgcgagtggaggtgttgctattgcagcagcttcttcacaaacgcaaacacaagagattgaaagtgctggcggcgacaggaggaggagatacaggggagtgaggcagaggccgtgggggaaatgggcggcagagattcgcgatcctcacaaagcggcgagagtgtggcttgggacattcgacactgccgaggctgcggccagagcctacgatgaagccgcattgaggttcagaggtaacagagcaaaacttaatttccccgaaaacgttgtaccggttccacctcctcctccggttcccgatttaccggcaagtgcggtagccggttccgattccatttccggttccggttcagtggtggcaggtttttcgccgacgctgatgcagggagcgccgtttcagggctcctctgcttttctgagagattattgggggtattctcagctgctgaggagtacaggggacttccatggactcgaccagtggttctttgattctcaaatggcagcgtttcaatcttcttcatcgtcgttgttgccatcgccgccgccgccgtcgttttcgccttcctctgcttcgtatcctctgttttcttccagccagcaaatggggattttccggccgccgggagagcagggtcatggcggagaagacggtggtagtgggtcagagttttcggagcttccaccttcgacgtggtcagataccagtggctatcctcctccaccacctggttgacatggaatacacatttttttctttattctattttttctctttctttggttaaagaaagaacaaggctttcttctgtttatttattttaatttatctgtttttgcttttttagattatttggagtccagttcactgaatttttatgtggttttgggttaaactgttactatttgctgctgttatttgaataaatactatttgaagagtagggagtagggaatgggaggttggaggatgcatgataaaggctttaagcctttgaggtagatacgaatggagtttaagtggtacgacaaagcagtacttaggttggaagctgagtttattccagattatcaactcaatggatttgatgttaacattttgtcaacaatccacgcaaaggtgaagaaaccaatatcttttataaaacctgttcccaataaaccaacttttttattatggaatgaggattgagggatgtatttagaagatataatactaatttagtgtgatatgcataattttggtttttaagctggtgttaattgttt

SEQ ID NO: 835 - DNA, 5509 bp, Glycine max
caaattgagtgggttccacacaggtaaaattttcttcgttgtattttcttattctttttcttcctcttcttctttcttcttctcctcttcacacagttctcttactaattttttcttccttccattcagcaattcttccattcttcatatctctcctttctcttgcttaccctcttctctttcctccaaaaagatttcgactttgccggctcggtttctttgactccttcacaccaaattctttgcttattgctgaaaacggcaattttgtggctttaggagctcagattcatttgggggtcacatccttgtatttgtttttgggtttgctttgacgaataagtgatcaaaatcaggcctctttataatatagtttctggatcagtgttggatcggatgtgtagtatgtgccattattgtggtgtgggcttgacagaatcaaattttgacaacaagaaacagggaaatgagagtagtctaaagttgaatggtaaagtttccattaggccttgcaaatcttgtggagagaagctagagcgagcaaatgcgaaatggcatagtacaagtccatatgcaacaccacttatcagtccaactatgtcattgctaagtactgatagctgtatctccacttgcagtgagttttcagttgatgtgaactcatctgacaggaatagtcaagaagaaagttcagttgaaggcattgtggaagagcttgattataagttgaatggttcacaaaaagtgatggaaaacaataacaacaatgagggttacacagtgagagatgtggagattgcacaaaactttcaagaagtaaaagctgatttttctgaagaacctattgcatcctctgctgtcgaagaagctgaatattctcttcctgatgatttggatgtccaaacttgggaacctcctgagccagaaaacccacaggatgatatggaaaatagtgtgacttgtaatgacgatgatgaagaccagggcctagggattgcaaactggggtgagcctacctctatgagtagttctgaggatgaattaagtgggagctataggttcaaagaggaaaaacaaaaagcaatggaagaagtaatgaatgggaaattcaaggcacttgttggtcagcttcttaaatctgtgggagtttcctcttctgatgaaggtgataagagttgggtggacatagttacatctttatcatgggaagctgcttcttttttgaagcctggtgcaattggaggtaatgcaatgaatcctgatggatatgttaaagtgaagtgcattgctgctggttcccgcagccaaagtcaactaatcagaggtttggtcttcaaaaaacatgctgctcacaagcatatgcctactaagtataaaaatccaagattattactgattagcggtgtgcttggccattctatcaatggactgtcttcctttgactccatggaccaggagaaagatgatctgaaatctaaaatggatcgtatagaaatgtgccatccaaatgttatattagtggagaaaactgtttctcgtgatatacaagagtcaattttggcaaagggaatgacacttgtgcttgatatgaagcttcatcgtctagaaagagttgcacgttgtactagttcaccaattttatcatgcgataatttgaacggtcaaaagctaagacactgtgactttatctattttgagaagtttgtggaggaacatgatgctgttggtgaaggaggaaagaagcccatcaagactttgatgttcattgagggctgtcctacacgtttgggctgcacgattttactgaaaggtacacacagtgatgaactgaagaggatcaaatgtgtcatacggtgtgcagttgtcatggcatatcacttgatccttgaaacctcttttcttgttgatcagaaagcaatgttctctaccattcctgctgtgagtgtagcagatatcttgccaactgataaaaaatcctgtgattcagcatccattaattcaagcattccatctcttgagtattctgctgagaatggaatagttagtactgatattcccatatgcagtggacttcatgaaaaaaacaccaatggtttaaaccttggatcggaggagttttcccaattctcttgtgaaccatataatccagccgtcttttctgggttctcagctatttcatcttctcttaagaaggttatgggggacagttttccctttgcatcttccgctccttatcaatctttatcagcatactttggcttcaatggaaggaaacctgatggtatggttaatgagtcaatttctgttttaaactctctagaggctgatgaaactaccacgatggaagcgaaaagtcattctaatgaagtgaagttacttaatggtggacaatccctgtcttcacctgtgcacttagattccaatgggaatataagtaaagatgatggaaataatagaaaagaactccaaagtaaagatgatatcaatgccgtgttggattctcagagtattttggtcttgatgtctagccggaatgccttaagagggactgtatgccagcaaagtcatttttcacatattatgttctacaagaattttgatattccacttggaaagtttctggaggaaaacttactcaatcagacaagactttgtgatgcttgtcaagaactgccagatgctcacttttattattatgctcatcactataaacagcttactatacaagttaaacgcttgccccaggaaaaaagtttgcttggagaggcagaagggaaaatttggatgtggagccgttgtcgaaaatgcaagtctggttctacaaagagagtattgatatccaccactgcccgtagtttatcatttggaaaatttttggagcttagcctttctcactattcttctagcagaaaattgagttgtggacattctcttgatagggattttctctacttctttggattaggtcacatggttgcaatgttcagatattcatctgttgccacatatactgtgtctatgcctcctcaaaagctagaattcagtggtgcaataagacaagagtggctttcaaaagagacccagaatgtgtatatgaaaggcataacattattcaccgaagttgcaaactgtttgaagacaatacaatttgatggccttggaggatcaattagagatttctctgaggttgagaaaatgttaaagcaagagcaagaagaatttgaggcaaacatcaagactgttgttgctaaaaagggggatccagatcaggctgccttcaaacttctcagtttaaaccgattgatgtgggatcttttgattaaatcctatgtgtgggttcggcgcttgtacccattacactcatctgatgtctctgagaaagttatgcaagaacacgattattcaaaggtggaaggtactgctagtagagaaactgggtctatgggtaattttattgaagatgggaatgccaatgtaaaaattatgtttgacacatctaagcaagtaaatgaactaccaataaaggaaattcctatcagtgggcctcttctagagtgcaatgaacaggctcatccatctaacacacagaatgaaaggataccaattgttgatgatttgagatcaaggagattgtctgaccaaaagttgaatttgagtctggatgttataccaactcatcttgaagtaggtgcaaattcttcaggttctacagatattcaaactaatcatttggtttctgatttcaagatattaaacaaaagtgcttccttgcattcaccaatttctaacatgctggattcaaatgattggttctggaagccatttgctgacattcggcagataggcataagggaactccagaaaagattattgccaaaatttgaatctgtaagctgctctattgctgaatatatacccacagcaaatcaattaatcactgaggaaggtacaaggttgcatatccctctcaagactgacaatcatgttgtgtctgacttcgagggtgaaccctcaagcataattgcttgtgcacttgcgttattgaaagatgcatatgaggtgtcagaagttgatgatgaggatgacagaaacgaaagtggaataacttcaaactcaacagaaagtttgcatggcttgacccatggcgctaccttaacttcttcacactcattttcaagaagttcttcagattcagattctgtgcattcagcaggaagcacttcttcagaggagtcacgagcctctcgtgctacagaaaaccatagcatagagattgctatgggttatgcaaaatcacttgggagggaaaaatattcagtgatatgtcattattttaagcagttccgtgaacttagaaattggtgttgcccatctgagcttgattttattgcttctttaagccgctgtaggaattgggatgccaaaggtggaaaaagcaagtcctattttgcaaaaacacttgatgacagattcatcataaaagagattaagaagacagaacttgattcatttttggggttttcttctctgtatttcaaacacatgagagaatcatttgaatttggcagccaaacttgtcttgcaaaagtcttggggatatatcaggttactaaaagacacgtcaaaagtggaaaagaggttaaatatgaccccctcatggtgatggaaaatcttacctacaatagaaatattacacgccagtatgatcttaaaggtgctctttatgcccggtacaattctgctgccgatggtgctggagatgttcttttggatcagaactttgtgaatgacatgaattcttccccattatatgtcagccataaagcaaaacgtgttcttcaacgtgctgtttggaatgacacatcttttctgaattcaatcaatgtgatggattactccttgcttgttggagtagattctcagaagcacgagcttgtctgcgggatcattgattatctcaggcagtatacttgggacaaacatcttgagacatggatgaagtcttcacttgttgtgccaaaaaatgtgttgccaactgtaatctctcctaaagaatacaaaaagaggttcagaaagtttatgtctacatattttttgagtgttccagatcactggtgttcccagaaatcctccaatccttgcaaactttgttgctcaggggaagatgacccttcccagcaaaagccctagcacaagattgccaagtggtttctctgtccaaatctttttgattcaatttctcaaaagaaaaaaaaaatacaaattgagaatttatgcaagtagttagcagtactgtatatagacagtcaatattgattataaatctagccctgctattctgcgatttttagcgaatttctagggatgctgtcatttacaggtccaccctctcccagtatgagatgagtaaatttttgtaggcctaaggtaaatgtaaaggtttatttaatcaatgaaaagtacagttgctagctttcctttgtacccttcccctaattctttttttgtt

SEQ ID NO: 836 - DNA, 2036 bp, Glycine max
gtcagagtatctgcacacactcagattctaaactctctttctagtcaaaaacaatagtggtgccaatcgcaccacagctagtagcgttacagattaacactaatgctgctggaagtggagcacgccaacaatctgtagggtgttacttgctctcggccttacagtggacgaagaagaccacaccatcctcttggtctcaccttctcccacccatatggccgtaggttgtaaaagtcatagccctaaaccagcttatgcttgagactaaaatccacgtaccgccttctcccatctccatgtctaagtgaggcagcccattctgcaagcatttcattattcggagagttttccctctgaacttgcatgttgatctgcctatctccatctaggacagaaaacccttcttctttgtacttgtttggtttcatcatattcacgaaactaaaactaggaagagttctttgaactttatgttccttgttgattttcatatctttgaccactttttggaccgtacatatgtccgctgcatctttgaatggaaggaatgaaacaatggtgataagaacaattccatgcaacaaagagaactattcttttcaccattgtgtgaatggctatgtggacaagttctctttgttgaaggaaactattcctatcaccaatgtttcattccttccatttaaagatgcagtaaggacatgtgtaccgtccaagaagtggtcaaaaatatggaaaaaaatcaacgatgaacatagagttcaacgaactcttctttgtttatcctcatgaatctgatgaaacccaaagaagtacagagaagggttttctctctcagatagagacaggcagatcaggatgccagttcagagggaaaactctccaaacaacgaaacgcttgtaaaatgggcatcctcgcttagactcggagatggaagaaggaggctcgtggatttcagtctcaagcgtaggctggtttatggttttgactttaacagcctacgacatgcaaagtaattcatcccaccactttctccacttccttggccatatggaagggagaaagtgagactaagaggatggtgcgattcgcaccactattgtagttttcttaggcttttgttgtggtggcgactgatccacccttgcatcggttttattaaatgttgttggtagttgtgatggtgttaaaactagtttacctgagggtttgtttgctgtccgagtagcagctgctgagcaattggtgttttgctcccttgcagaggaagcagtgacatcatctttgctgcctctactgctctcgctttgggaaattgggataacggtttctttagtcatattagaattaggggaattgttgcaggggttcaagaggtgcctgaagaaaaagatgttcttgactagaaaaagagtatagaatctgagtgtgtgcagaaattcttacagtaagagatgcttataaagtgagagttttggactattgagtgtacgagatggttttatagtagggattaggatttagtcgtgtcggtatctttacaatatttggattcttgtacgtgtggtatctttacaatattttgtaaaactgcttcgcaattaaacgcttgcacaaaagagtttcatgaaggatgagaaaaacaataccgaatttccatcgagcttggactagtgcaacttctgggttgtaagcaaggaatggtatggtgcgccaaaggaagttaggctcaggttggaaatcagcatcaaagatggccacatagtcacacaaattcacatagctgtgcttcatgccttctttgagagctccagctttgtaaccatttctgttctctctgatctcatactttatgtttacgcctttactggcccatctctggcattccacctccaccatattctgtggtgttttggtaaaaaagaaaacaagaaaaaaaaagaggttatgtgagcactaactaggaatatatgaatgtattgtgttattttatacatggacaaattgatggtcaggatagataatgcagaatcat

SEQ ID NO: 837 - DNA, 2137 bp, Glycine max
ttcactcccttggccggcaacataatattcagaaaatgaaatctaattttcttattgattttatccttgctagctacaactgacatagttaacaatgtttgtccttgtacttggcgtagataagccttgtatatatgatatgttgatcatagttcacacacattttgcctcagcctcacagcattagttctgcttctgcattaacaagtttatcaaatttacagaaaatgtcaggagagcaaatcttgtcatccaatgaagaatataataaatctcagcctccatttggtagcaagagtggttacgattcaagaacaggcatctatcactctctaattaagcttgtcaccaagcatgaaatcccaacaaggcctgatcttaacactgccaattttgtgctgtcacagttcccacagacacaccttgctgaggcaagaattgcattcattgattcaggtactagtaggagtgtaagctatggtgagctaaaaaggtctatttactcccttgcatcagctttgttccatggacttgagattaggaaaggtgatgttgtatttgtattgtcaccaaactcaaccttgtactcagccatatgcctagctgttttatcagttggagcagttcttaccactgccaaccccatcaacactgcaacagaaattgcgaagcaagtgcatgattcgggtgctaaactagccatctcagcacctgaggagctacacaaattggtcccaactggggttcctataattctcacttctcgtccttctgatggcaacatgttatcagttgaagagttaatagaaggctgttgtacttcaccagagttgcctcaagttcctgtggcacaatcagacactgctgctatactttactcttcaggaaccacaggggtaagcaaaggtgtggttctgacacatgcaaatctcatttccataatgagactactcttttggtctgctgatgtaagtggatcccaagatgatgttttcttggccttcattccaatgtttcacatctatggacttgtgttctttggattaggattgttgtgtgttggtgtcacgacaattttgatgcagaaatatgacttccaaggcatgcttgatgcaatccagaagcacaaggttaacaacatagcagcagtgccaccagtgatccttgcactagtaaaacaagcaaagaaaactaggtgtgacttgtccagcctaagaagggtggggtcaggtgctgcacctttgagcaaggaagtggcacaagagtttagaaggatgtttccttgggttgaactaaggcaaggttatggcctaacagaaagtagtggtggagcaacattttttccctcggataaagatgctaaagctcatccagattcatgtgggaagctgattccaactttttgtgcaaaagttgtagacatcgaaacggggaagcctttgcctcctcataaagagggagaattatggttcaaaagtcctactattatgaaaggatatctaggaaatttggaggcaacaagtgcaactattgattcagaaggttggttgaagactggtgatcttggttacattgatgagaagggatttgtttatatagttgaacgaataaaggagctaatcaagcacaatggttatcaggtggctcctgcagaactggaatctgtgctgctaagtcatccccttatagttgatgcagcagttataccggttgaagatgaagaaactggacagataccaatggcatatgtggtgagagcagctggttctgaactctcagaaaaccaagtcattcaatttgttgcaggccaggtggctccatataagaaagtgagaaaggtgagtttcattgtcactattccaaagtcagctgctggcaagatattgcggaaggatcttgtttctcaaagcaaatatcaacttgtctccaagttatgactaacatgtataaatgttagtattccagaatgttttacttgggtctaagatatccgatttttagccatagatttacttatgcgggcaaagggtatcaattttccaatggatatttaatgtttgtaaaactagcataattggatttgaccaaaggaagagaagaacactgtgaaatcagaactcaactgggagactcaaaa

SEQ ID NO: 838 - DNA, 747 bp, Glycine max
atggcctcattgggtgggttacaaaatgtgagcggcatcaattttcttatcaaagagggtccaaaagtcaatgcaaagttcgagctgaagccgccaccatatccactgaatggtttggagccggtgatgagccagcagacacttgagtttcactgggggaagcaccacaagacttatgtggaaaatctgaaaaaacaagttgttgggacagagcttgatgggaagtcactagaagagattattgtcacatcatacaataagggtgacattcttccagctttcaacaatgcagcacaggtatggaaccatgacttcttctgggagtgcatgaaaccaggtggaggtggaaagccatccggggagcttctagaactgattgaaagagactttggttcatttgtaaaattccttgatgagttcaaggctgctgctgcaacacaatttggttcagggtgggcttggctagcatatagagcaagaaaatttgatggggaaaatgtagcaaatcctccttcacccgatgaggacaacaagctagtggtgctcaagagtcccaatgctgtgaacccccttgtttggggaggttactacccacttcttaccattgatgtttgggagcatgcttactaccttgattttcagaaccggcgtcctgattatatatcagtgttcatggataagcttgtttcctgggatgcagtgagctctagacttgaacaagctaaggctttaattaccagtgcatga

SEQ ID NO: 839 - DNA, 441 bp, Glycine max
atggtcttcttattatgcctattgaatgtaataacccatcttccaaatctcacaaacgcatcatcatcgtgcaaatccaaagggcttcattcccccccatataatccctctggaacgcatgccattctcactctcaacaacttcgctcgcggcggggatggaggcggccccgccgagtgcgacggtaagttccatccgctgccacaaagagtggtggcactctccaccggatggtacaacaaaggcgcacgatgcgggaaaatgataagaatcaaagctagaaatggaagaagcacgttggctaaggtggtggacgagtgtgactctgtgcatggctgtgcatgcaagaccaacgttgttgatgcgtccaaaaccgtgtggaaggatttgggactcaacacaaatgatggtgaagtaccagtgacttggaccatggtataa

SEQ ID NO: 840 - DNA, 1189 bp, Glycine max
agcttccaagcaatttcgtagttgaccaagacttgggagttatggagaaatgagataagcaacctaaagttgcagcttcagcttcacaatattcttgtctgaataataaaaagaaaaaaggttcatagttgatatctccagcggaacgatgaagtttgaagatttggcagaaggatgcatggcaaaaatactgtcctacaccactcgtgcggatgtatgcaggctttctctggtttccaaagcctttcattccgcggctgaagccaacactgtgtgggattgctttctcccctctgatttgtcctctatcatctccccttcttcttccgttcctccctttcgctctattaaggatctctatctctatctctccgatcgtcccaccatcatcgatcaaggtataaagagttttcaattggagaagcggactgggaacaagtgttacatgctttccgctagagatctgagcattatatggggtgacactactcattattgggagtggacaaccctaccagagtccagcaggttcgaagaagttgctaggcttcgagctgtgtgttggtttgacattactgggaggatgaacacccgcgttttgtcgccaaatactaattatgcagcttttcttgtgttcaagatgatcgatgccggtggatttcactacgatcctgcggtgttatcagtaggtattttgggaggcaatagcagtaccaaaaatgtttgtttggatcccaacttagtagataatcgacttgatgatagattccatggactccaacgtccaactgtgaggagcgatgggtggctggagattgagatgggtgagttcttcaatccaggcctagaagaagatgagttgcagattaaagtctcggagacaacaagtaattggtggaagcgcggtttcattcttgaaggaatagaagttaggcctaaacatgtttgatccatcaaattaatatacttaacttaggcctatcaaagatatgtatggaatggaagggtgatctttgccaagaatggagggagaaaccggaaacatttgttcttttcttttgttttatttttcttcttttttcattgatcatttctattttgtttttgcatttaggtataatgaactgattgcttgtattgtttcctcattaaatgtggggtttgagtagtttatatttcagttttttta

SEQ ID NO: 841 - DNA, 3155 bp, Glycine max
ggcaattttaaattaaaaaaaaaggggaaaagctaagaaacaaaaacaaggcaaaaacctcagtttcggaaagaaacataatctggaattcgagaagcaaattaatctttgttcctcctctcgcaggtaactcaatccttatcttctccgtccctttctctatttgcccctagtagtttttttctctctctctctctttagaagattccacttcaactctataccttctcgcgtttcaatttcaataaatatatctaattgggtctttatcttttcaattattgctgtgggtttgattcatgtgattttctttcccttttgtctctccttaattttactcttctgcggtgaaggttttttctctctacctgctgaagatggttaggggaggaaggtttagtggcaaacgcaatttcagaaaaagggttcggtcgaaggagggagtttctgatgattcggatgaagactatgtggtttcagatgaaggtagagaggcatccgactattactgctcctccttagatggatgcgcatcagaggagggttttgatagtttaatggaagaagaggaggaggaatttcgaagagtgaggagtttaaatagatccaagtcagaaaagggcattgctggtcggtggaaaaatggcattaaaaactcatacaagaggggaaggattacatatgaagaagaagaagaagaggaagaggtagaggaagagtttgaagaggaggaggaggaggaaattcaagaagtgaggaatttcaataggtcaaaggccaaaaatggtgtatgtagtaagaaaaaacgtgcaggtaaaatctccccaaagaggggaaggaaaatacgtgcagaacatttggaagaagaggaggaggaggaagaggagaaacaagtggtggaggatgaggaggaagagaaggtggagagaagtggagatgaggaagaagaaccagagggagatagagatggagaggatgaagattttgaatatgatgatgaggatgatgaatttttgccagaggaagaagattattcagatgaggaagaagaaatgggggggagaaagaagaaaaacgatggcgtgaaaatggagaaggaggttttgcagaagaaaagggcctctgtggtttctactaggggtcggaaaaggcggagttctatagcatcaaagaagcccttgagaaacaaaagaagaaagaatgggaggttaaggaagaaagaaaaatgtgaagatgattttatagataatggcacaaccatagggacaacgactaggagaaagcagggccagaagaggagaagggtgcttctttcagattcagattatgcatcttctggatcatctgattttgagtttaccatatctgaagaagagagagaacaggtgagagaagccaagagattgtgtggaaatttgagaaataacttgaggagttcatcccatctaataaataatgaagaggttggagtccatgagtatcaacatccgcagcggaagcctccagctcggaagggtaaggaaaagatagaagaacctctgggaagaaagggtaaggaaaaggtggaggatttaaaaagtaagggaaagcaaacatgtggaatttgtctatctgaagaagataaaagaagagtaaggggagtactaaattgttgcactcacttcttttgttttgcttgcattatggagtgggcaaaggtggaatctcgctgccctttgtgtaaacagagattcaaagcaatcagcaagcctgcacggtcaacgacggggattgatttaagagaagtggtgatacaagtccctgaacgtgaccaggtttatcagccctctgaagaagaactaaggagctatattgatccatatgaatatgttatttgttcagagtgtcatcaaggtggagatgatggcctcatgctactctgtgatatctgtgattcccctgcacacacatattgtgttggtttggggcgggaagtacctgaaggtaactggtattgtgatggatgtagaccagttgctttgggatcttcaagctcccaagttcaagaaggtgtggctgatccaagggtatctgtccagagccatcctgttagaccaccccctgttctacatgtacgagaaagtatagacctcaacttgatttcgtcaccccgtgctgcttttaatcaaggttttgggcatcttccatcttctagatttagtggcagaagtgctgaaggagcctctcctgtatctggaggggcaccaactttatcagagagacgctggatacaccgtcagattcaacaactactttcaatagataggatggcctctacacctggcagaaccaatggtatttctgctaccagttcaactagtaacttatatagctctcactttgatcaaagtaggggaaccaccactctgcatgcaaggacacaggatgtgggaacatcataccacacattttttgatgagagattatgcaacaattcctccccattaatgcagaatggggcattatggtctggacttatggggacacccccagtaccagattgtgaacaagttcatcagttcagtagatcaaacattgttcctgatggtggcttatcccctgctgtcagagaagagagtaactttcactttgcaaaggagcagttgcagtcaatggttaaaagccacttgaagagcttgtctcaaaatattgatttaggccacaatactatcaaggatattgcaaggagttctatgcacaccatactagcagcttgtgatcttgagcacatgaagagtgaagtttgcactgtgcctcctccatctgcctgttcccatatggagctaatggctggtgggcaaacgagtctaattaaaggttgctgctcatcttgctttgattcctttgtaggagatgtggtgaagaggattttggacacaagaatttcgtcacagtggttacgattaggtctttaggcataaaatcattgttatgtgtccaaagacaccttttttgttagttcagaaagacaaggaacatttcatttacttgtttatacataccatatgaatatgattcactacatctgaacagaaaggctgttgcttctaacattttatttgtttaattgatacagaaactggtgaacaatatacgcttcagagtattgcttggtt

SEQ ID NO: 842 - DNA, 687 bp, Glycine max
atggcaatggcatttccgtccgtaacctctgtaactgtggagaacgtgacattccctcccaccgtgaagcctccctgctcccccaacaccttcttcctcgccggcgccggcgtcaggggcctccaaattcatcacgctttcgttaaattcactgccatctgcatttacctccaatacgacgccctttccttcctctccgttaagtggaaaaccaagtctactcaccagttaacggaatccgaccaattcttctcagatatcgttacaggtccattcgagaaatttatgcaggtgacaatgatcaaacccttgacggggcagcaatactcagagaaagtggcagaaaattgtgtggccatttggaggtctcttgggatttatacagattcagaagccgaagcaatagacaagtttctttctgttttcaaagacctaacattcccaccaggctcctctatccttttcactgtctcacccaatggatcattaacgataagtttctctggtgatgaaaccattccagaagttacgagtgctgttatagagaataaactactctcagaggctgtgttggagtcaatgataggtaagaatggcgtttcccctgcagcaaaacagagtttggcctccagattatctcacttattcaaagagcctggggtttgtgaccctcaatctcataagtga

SEQ ID NO: 843 - DNA, 2070 bp, Glycine max
attcaacttcccatcgctttattccaccaagaatggccacttcattctctgccaactcccccaatattgcagcaaacaagttaatagaaggagatagcagcaacagagaagaatcagtactcatggagagaactagcagagcgggtgaaaagaaaacaggaggagccaaagttgcaagcctcttgctagtgaatcaagcactagctacactagccttctttggagttggagtgaacttggttctgttcctaaccagagttcttggtcaagacaatgtgaatgccgctaataacgtgagcaagtggataggaactgtttatatgttctcattgatcggagcatttctgagtgattcatactggggtcgatacttaacctgcacagtctttcagcttgttttcgttctgggcttagcactgtcctcattgtcatcttggcgtttcttgatcaacccagttggttgtggtgatggccatactccttgtaaaccctcatcaattggagacgagatattctacttgtccatatatctagtggcttttggttatggggggcaccaacccaccttagcaacatttggtgcggaccaatatgatgagaaaaatccaaaagagaagagttcaaaagtggctttcttctgttacttttactttgccctcaatgttggttctttgttctccaacactgtactagtctactatgaggatacagggatgtggacaatgggtttcttggtatcgttggtctctgctgtcatagccttcttggctttcttattgggaactccaagatataggtatgtcaagccatgtggaaacccagtgatgagggttgcacaggtattcagtgctgttttcagaaaatggaaggtatctcctgcaaaggcagaagaactttatgaggtcgatggtccacaatctgctataaaaggcagtagaaagattcggcacactgatgattttgaattcatggacaaggcagcaacaattaaagagactgaggagcatagtccaaagaatccatggaggctctgcactgtgactcaagtggaggaagccaaatgtgtgttaagaatgttaccagtttggctatgcaccattatttactcagttgtgtttacacaaatggcttctctttttgttgagcaaggggatgtcatgaactcctatataggaagttttcatttgccagcagccagtatgtctgcgtttgacatctgcagtgtccttgtctgcactggaatttatcgccaaatcctcgttccactagctggaagattgagtggtaatccaaagggactaagtgagcttcaaagaatgggaattggcctaattattggtatgctggcaatggttgcatctggtgccacagagattgcaaggctaagacgtattagtcatggccagaagacaagttccttgagcatattttggcaaatcccacagtatgttttggttggtgcttcagaagtttttatgtatgttggtcaattggagttctttaatgggcaagccccagatggcataaaaagctttgggagctcactttgcatggcttcaatttctcttggtaactatgtaagcagcatgcttgtgaacatggttatgataatcacagcaagaggccagagtaaaggttggattccagagaacttgaacacagggcacatggataggtttttctttctccttgcggggctagctgcctttgacttcgtgctatacttgttctgtgccaagtggtacaagagcatcaatattgaagatagtgacatgggagaccaagggcaagagaaggaggaggatgtaaataacaaggtttaagagtttcacctttcacctttcaccttgtacaatgcaagtgtgttgagtatttattttctccccccaagcattaatattaatgtattcagtcaacaagaactgcattctctctctagccaccatatactgctgtgttaggcttctgtttgccattaattttttttttaaagtgaattggatgtgtaagccagtgatttgttaattggtgcttaaattatccatttataccttagcttaatcattccca

SEQ ID NO: 844 - DNA, 2799 bp, Glycine max
atggcagtgctatatgcaactcatgttcttctcttgatattgtccactgcaacaactctccacttcagtgcaagcaaggcagcaaggctcaatatgacttgcagcgagaaggaaaggaatgcactcctcagcttcaagcatggactagcagacccttcaaacaggctttcatcgtggtctgacaaatcggattgctgtacatggccaggggttcactgcaacaacacaggtaaagtcatggaaatcaatcttgacacacctgcgggctctccctatagggagttgagtggagagattagtccttctttgcttgaactaaaatatttgaatcgtttggacttgagttcaaattattttgttcttactccaataccaagcttcctaggctcattggagagtctgagatacttggaccttagcttaagtgggttcatgggattaatccctcatcaactaggaaacctctcaaacctgcagcaccttaatcttggatacaattatgctcttcagatagataaccttaattggatatcaaggctatcttccttggagtaccttgatttgagtggttcagaccttcataaacaaggtaactggcttcaagtactgagtgcacttccatctctttcagaactacacttggagagctgtcaaattgataacttaggaccaccaaaacgaaaagccaacttcacacatctccaagtccttgatctttcaattaacaatctcaatcaccaaatcccttcatggctatttaatctcagcacaactcttgtccaacttgatttacacagtaaccttttacagggacaaattccacaaataatatcaagccttcagaacataaaaaatctagacctgcagaacaaccagctcagtgggccacttccagattcattaggccagcttaagcatcttgaagttctaaatctcagtaataatacctttacttgtccaattccctcaccatttgcaaacttgtcatccttgagaactttaaacctggctcacaaccgactgaatggaaccattcctaagagttttgagttcctcagaaacctgcaggtattaaatcttggaactaattctttgactggtgatatgcctgtaactcttggaactctctcaaatttagtaatgttagacctttcatctaatttgttagaaggatctataaaagagtcaaattttgtaaaacttttgaaattaaaggaactacgtttgtcttggacaaacttgttcctcagtgtcaactcaggatgggttcctccttttcagcttgaatatgttttactgagctcctttggaataggtcctaagtttccagaatggctaaaaaggcaaagttctgtgaaggttttgacaatgtctaaggcaggtatcgcagacttggttccaagttggttttggaattggacttcgcaaattgaattcctggatctgtcaaacaatctgttaagtggagacctatctaacatctttctcaattgcagcgtcataaatttgagttctaatttgttcaagggtacattgccaagtgtgtctgcaaatgttgaagtgctgaatgttgccaataactcaatttccggaacaatttctccctttttatgtggaaaggaaaatgctactaataagttaagtgtgcttgatttttcaaataatgtcttatatggtgatcttggtcactgttgggtgcattggcaagcattggtgcatttgaacttgggtagtaacaatttgtctggtgttattccaaactccatggggtatctatctcaacttgagtctttgttgttagacgacaaccgcttctctggatatattccttcaacactgcaaaattgctctacaatgaaattcattgacatgggcaataaccaactttctgacgcaataccagattggatgtgggaaatgcaatatctaatggttcttcgtctaagatccaacaatttcaatggcagcattactgaaaagatttgtcaactttcttcccttatagtgctggatcttggcaataacagcctgtcaggatccattccaaattgtttggatgacatgaagacaatggctggtgaagatgacttctttgccaaccctttaagttattcatatggctctgacttcagttataaccactacaaggaaactcttgtcttagttcccaaaggagatgagttagagtacagagacaatctgatattggtgagaatgattgatctttcaagtaataagctgtctggagcaattccatctgaaatttccaagctatctgctttgcggtttttgaacttgtctagaaatcatctgtctggagggataccaaatgacatgggaaaaatgaaattgttagaatcccttgatctctcactaaacaacatttcaggtcaaatccctcaaagcttatctgatttgtccttcctcagtgtcctgaatctatcatacaacaacttatcaggcagaattcccacgagcacccaacttcagagctttgaagaacttagctacactggaaatcctgagctttgtggtcctcctgtaacaaaaaattgcacagacaaggaagagttgacagagagtgcttctgttggacacggtgatggtaatttctttggaacatcagagttttatatcggtatgggagttgaatttgcagcaggattttggggtttttgcagtgttgttttctttaacagaacttggaggcgtgcttattttcattaccttgaccacttgagagatctgatttatgtgataatagttttgaaggtaagaaggttacttgggaaattgtga

SEQ ID NO: 845 - DNA, 258 bp, Glycine max
atggtggcccaagcccgggctgttgatatgctcgtggagacgtcatcatcgcgattgtggatggcagcgcgcgcccttggcgtgcctcggcacctgcgcgctcctggcgtcggcctgtgggctccccattcggcccgtcttgaaacacggaccaaggagtctgacatgtgtgcgagtcaacgggcgagtaaacccgtaaggcgcaaggaagctgattggtgggatccccctgtgggttgcaccgccgaccgaccctga

SEQ ID NO: 846 - DNA, 1728 bp, Glycine max
gaaagggggcgccagagagggtgagagccccgtcgtgcccggaccctgtcgcaccacgaggcgctgtcggcgagtcgggttgtttgggaatgcagccccaatcggccggtaattccgtccaaggctaaatactggcgagagaccgatagcgaacaagtaccgcgagggaaagatgaaaaggactttgaaaagagagtcaaagagtgcttgaaattgtcgggagggaagcggatgggggccggcgatgtgtcccggtcggatgtggaacggtgagagccggtccgccgatcgactcgggacattgaccgacgcggattgcgatggtggcccaagcccgggctgttgatatgctcgtggagacgtcatcatcgcgattgtggatggcagcgcgcgcccttggcgtgcctcggcacctgcgcgctcctggcgtcggcctgtgggctccccattcggcccgtcttgaaacacggaccaaggagtctgacatgtgtgcgagtcaacgggcgagtaaacccgtaaggcgcaaggaagctgattggtgggatccccctgtgggttgcaccgccgaccgaccctgatcttctgtgaagggttcgagtgagagcatacctgtcgggacccgaaagatggtgaactatgctgagcggggcgaagccagaggaaactctggtggaggcccgcagcgatactgacgtgcaaatcgttcgtctgacttgggtataggggcgaaagactaatcgaaccgtctagtagctggttccctccgaagtttccctcaggatagctggagcccgcgggcgagttctatcgggtaaagccaatgattagaggcatcgggggcgcaacgccctcgacctattctcaaactttaaataggtaggacggtgcggctgctctgttgagccgcgccatggaatcgagagctccaagtgggccatttttggtaagcagaactggcgatgcgggatgaaccggaagctgggttacggtgcccaactgcgcgctaacctagaccccacaaagggtgttggtcgattaagacagcaggacggtggtcatggaagtcgaaatccgctaaggagtgtgtaacaactcacctgccgaatcaactagccccgaaaatggatggcgctaaagcgcgcgacctatacccggccgtcggggcaaggaccaagccccgatgagtaggagggcgcggcggtcgctgcaaaacccagggcgcgagcccgggcggagcggtcgtcggtgcagatcttggtggtagtagcaaatattcaaatgagaactttgaaggccgaagaggggaaaggttccatgtgaacggcacttgcacatgggttagtcgatcctaagggacgggggaagcccgtctgatagcgctctgtgcgcgtactccgaaagggaatcgggttaaattcctgaaccgggacgtggcggctgacggcaacgttagggagtccggagacgtcggcgggggccccggaaagagttatcttttctgttaacagcctgcccaccctggaaacggctcagccggaggtagggtccagcggctggaagagcaccgcacgtcgcgtggtgtccggtgcgcccccggcggcccttgaaaatccggaggaccgagtgcctcccacgcccggtcgtactcataaccgcatcaggtctccaaggtgaacagcctctggtcgatggaacaatgtaggcaagggaagtcggcaaaatggatca

SEQ ID NO: 847 - DNA, 3652 bp, Glycine max
atgagttgttattttctgaaactattttatgcacttttgctgcttttattgcatgctgcaggatccattcttggattcaacagccttcccaatagcacagaaattaagtgcattgagactgagagacaagtactcctcaacttcacacatggcctcatagatgactttgacattctctctacatggagggacgatcacagtaacagagactgttgcaaatggaaaggcattcaatgcaacaatcaaactggtcatgttgagatgcttcatctccgtggtaatggtacacaatttttgagtggtgcaatcaatatctcttcattgattgcccttgaaaatattgaacacttggatctcagctctaatgattttgaagtgagtcatatcccagaactcatgggctcgttcaccaacttgagatatctcaatctctctgattctttatttggtgggagtattccttctgatattggaaagcttacacatttactgtctcttgatctaggtaagaatctttatctccatggacaaatcccttatcaacttggaaaccttacacatttacaatatcttgatctaagtgatagtgatctagatggggaactcccttatcaacttggaaatctctcacagttgaggtatcttgatcttggtggaaattcattttcgggagcactccctttccaaactgggaatcttcctttgttgcacactcttggacttggtggcagttttgatgtgaaatctaaggatgcagagtggttgactaatctttcttccttgacaaaacttaggctaagttcactacacaacctttcctcttctcatcactggctacaaatgatcagcaagcttattccaaacttaagagagttgaggctagttggttgttctctttcagatacaaatattcaatctctgttttattcaccttccaacttttccactgctcttaccatccttgatctttcttcaaataagctcacatcctcaacatttcaactgttgtcaaactttccttctcttgttatccttgacctttcctataataatatgacatcatcagtctttcaaggtggtttcaacttcagttcaaaacttcaaaatcttgatttgcaaaattgtagtcttacggatggaagttttcttatgtcatcttctttcattatgcgttcttcatcttctcttgtttcccttgatctctcctcaaatctgttgaaatcatcaactatattttactggctctttaactccaccaccaatcttcataaccttgtccttgattataacatgttagaaggtaccattccagatggatttgggaaagtaatgaactctcttgaagttcttgacctctacggtaacaaactgcaaggcgagattccatctttctttggtaaaatgtgcgcattgcaggggttacggctctcaaataacaagttgaacggggaattctctagcttcttccgaaattcttcatggtgcaacagagacatatttacgaggttggatttatcttataaccggttgactggcatgttacctaaaagcattggtttgctatcagagttggagcttcttttcttggatgggaattctttggagggtgacgtcactgaatcccatctttctaatttttccaaattaaaattcttgtccctatcagagaactcgttgtctctgaaattagtcccgagttgggttcctccattccaattagaaaaattggaactcagttcttgcaagttgggccccacttttcctagttggctcaagactcaaagttctttgttttggcttgatatttctgataacgggattaatgactctgtaccagactggttttggaataacttgcaaaatatgatgttattaaatatgtctcacaattatatcattagtgcaattcctaatatatccttgaagcttcctttcagaccatttatacatctgaaatcgaatcagtttgagggtaaaattccgtcatttttactacaagcttcccatctgattctctctgaaaataatttttcagatttgttttcattcttatgtgaccaaagcacagcttcaaatttggccactttagatttatcacgcaatcaaataaaggggcaactgccagattgttggaaatcagtaaagcaattactgttccttgatttaagcagcaacaaattgtcagggaagattcctatgtccatgggcgcccttgttaatatggaagccttggttttacgaaacaatggtttaatgggtgagttgccttcttctttgaagaattgcagcactttatttatgctggacctgagtgaaaatatgttgtcgggtccaataccatcatggattggagaaagtatgcagcaattgataatcttgaacatgcgaggaaatcacttctcaggaaatctacccattcatctctgttatttgaaccgtattcaattgttggatctttcaaggaataatttgtcaagaggaattccatcatgcttaaagaatttcactgcaatgtctgaacagagcatcaactcaagtgacactatgtctcgtatatattggtataataacacttaccatgatatttatggtcttttctcattcggagattatacgcttgacataacatggatgtggaaaggtgtggaaccggggttcaagaatccagagttagagctcaagagcattgatctttccagtaacaatttaacgggtgaaataccaaaggaggtcggatatttgcttgggttagtttctttgaatctatcaagaaacaatttgagtggagaaattccttctcggattgggaatttaaggtcactagaatcacttgacttgtcaagaaatcacatctctgggagaattccttcttctctttctgaaattgatgatttgggaaaattagacttgtcacacaactctctttctggaagaatcccatcaggaagacattttgaaacctttgaagcctccttttttgaaggaaacactgatctttgtggccaacaacttaacaaaacttgtcctggggatggagaacagacaacagcagagcatcaagaaccaccagtcaaaggtgatgattcagttttctatgagggattatacatcagcttggggattggatacttcactggattttggggcttattagggccattgctactgtggcgtccttggagaattgcttacatgaggtttctgaacagattaacagactatgtatatgtatgtttattgtgaatgtgggaattgttgctgatcgctccaaggcaaaaagatgtgctgcatgcttctgatcagagaagaaaccattgttggcagctacaaatgcgagataatatatttgtatttattgtataatatatttgtaatgctgtttgtttttcattattgtgcttagatctgtgttatctaaaatttcaccacttcatattcatcttcaacaatgctttctactatattctcctagtgcagctatacttaactgtgaatcaaatttgtgcatgagaagaagaatgcaagataccctatttgttcctagttactaccagtgtatttgcatccttgtgttagaccccttctgtacatgcacttttgctttgccaaaaataacaagcagagcattaaaaattgcatcaagctagtgtta

SEQ ID NO: 848 - DNA, 303 bp, Glycine max
atgttgctgcgcggggtgtatgctgacctcccgcgagcacccgcctcgtggttggttgaaatctgggttcatggccgacttcgccgtgataaaatggtggatgagccacgctcgagaccaatcacgtgcgagccggtcagttctggacccatcgacgaccctttgcgtgcacgcacgctcccaacgagacctcaggtcaggcggggctacccgctgagtttaagcatatcaataagcggaggaaaagaaactaacaaggattcccttagtaacggcgagcgaaccgggaaaagcccaccatga

SEQ ID NO: 849 - DNA, 944 bp, Glycine max
tccgcgggagtcgtcacgacacaacatttacatacaatgactctcggcaacggatatctcggctcttgcatcgatgaagaacgtagcgaaatgcgatacttggtgtgaattgcagaatcccgtgaaccatcgagtctttgaacgcaagttgcgcccgaagccattaggccgagggcacgcctgcctgggtgtcacacatcgtttccccaacgcaaacatgtaacaatgttgctgcgcggggtgtatgctgacctcccgcgagcacccgcctcgtggttggttgaaatctgggttcatggccgacttcgccgtgataaaatggtggatgagccacgctcgagaccaatcacgtgcgagccggtcagttctggacccatcgacgaccctttgcgtgcacgcacgctcccaacgagacctcaggtcaggcggggctacccgctgagtttaagcatatcaataagcggaggaaaagaaactaacaaggattcccttagtaacggcgagcgaaccgggaaaagcccaccatgaaaatcggtcgccctcggcgtccgaattgtagtctggagaagcgtcctcagtggcggaccgggcccaagtcccctggaagggggcgccagagagggtgagagccccgtcgtgcccggaccctgtcgcaccacgaggcgctgtcggcgagtcgggttgtttgggaatgcagccccaatcgggcggtaaattccgtccaaggctaaatactggcgagagaccgatagcgaacaagtaccgcgagggaaagatgaaaaggactttgaaaagagagtcaaagagtgcttgaaattgtcgggagggaagcggatgggggccggcgatgtgtcccggtcggatgtggaacggtgagagccgggtccgccgatcgactcgggacattgaccgacgcggattgcgatggtggcccaagcccgggg

SEQ ID NO: 850 - DNA, 360 bp, Glycine max
atgacggaagggtgtggtgaagggttttgccttgcaaaccttcccggtgatgcttttagtctatgggggaacttctttgaggcaaagaaacaaatgatggctgatgccaagtttgcggggctgcttgcgacaagggctgaatctcagtggatcgtggcagcaaggccactctgccacttacaataccccgtcgcgtatttaagtcgtctgcaaaggattctacccgccgctcgatgggaattgcgcttcaaggcgtctcgtagggctaatccgcctcacgagggtcaccaacggcacgtgcctttggggggccgaggccccctactgctggtcgttagagaaagaatgccacagatatag

SEQ ID NO: 851 - DNA, 1231 bp, Glycine max
actcttgctcccacattttcctttcaaccaccaagccaactttataataactcccgtagaattgtattcgtattggtcatggttttaaatagtggtccgcaactgcaattgtggccgcatcaacctcattttcccgcaattgtctactatgtaaaggttttctagctcactgcaactcagtcgcgaccgcaatttaaaaccatggataaagttttcccttgctacgaatacttgtgtactgatgagatcttgttgtagtacttcttgtttgtgctttattaaagaggaaaatggatctcaaggtgaaggcagcaacttccttgaattcaaatgccaaaaagaaggcaaatttgtttgctgaaaaaaaggagagaatccggctgccaacatataatgatgatcttggaggcaagaaatatcacatcagtgaatttctgagccaacctagcggaattgcagccgtgttgaatacgaaggccttgcaatcatttgaatctcttgatgctaacacatacaggtgtgaactgcctaaacttcaatttttaaactttgaagctgtgccattgttggatctgcgggttacctcaacagatgaagattgcttggttgagatgctttcttgtaagtttgagggttcagaagttgtgaaagagcaaaacgaccacttttcagcattcatgagaaaccaaatgacttggggtggtgctggtgccgaatcatttttagaagttgatgttaagttgaatctcacacttgagatctacacacaaccatttaccatgatgcctacttcagccgttgagggtcctggaaatataatgatgcaagctttggtggacaagctggtgccactgctacttcagcagatgctgcaagattatgatgaatgggttagaaagcaatcatattccttaaagtcattctaggtacgtaaaagccacttgtacaaactttttgggtagagacaacagaggagggagaacctttgatgtttagggaaaaggagagaaaaatgaatggtgaaaatttgatttctgaaagacttctgttgaaatctgtgtccatgtaaacattactcttctggttgatatttagtaacaagtgtctctttctgtcttctagttgttctatctagtttggcaagaaattataacacaagtgagatgcagggatgaatccatagggaataacattacgtaagaatttattttttatatataaatgaaatttc

SEQ ID NO: 852 - DNA, 3594 bp, Glycine max
ttttactctatgccgtggttcttttccgggtttgttttgtgtcatgtgctgctgcaagccctcttaaaccctatcacgctgggtttcgattagaaatcacaaccaacgaaatttctgtcaattcagcgaccaataacttcttccacctctgcttcctctccgcgccacagttaagtttctcgtggaattggaaaatccaggaattgaagaacttatgtgatgaactgtttgtgttaaatggccaataattctcaaccctccagcatgcagtttcggccagtcactcaagctcagcaagggcaaccatttgttccaatgaattcacaacaatttgggcctgcaggacatgctattccttcttcaaatgcggggatgcctgtcattcaaggtcagcaattgcagtattctcaaccaatgcagcagttgactcagagaccaatgcagcctggtcatcctgctccttcatcacaagctatacctatgcaatatattcagacaaaccggccactgacatccattccaccacattcacagcaaaatgttccccctttaagcaatcatatgcctggcttggctgtttcagtagcagctcctcattcttcatatttcacactatcttatggtcagcagcaagataatgcaaatgcattggctcaataccagcatccacctcaaatgtttgctcctccttctggtcaaccttggccatcctctgcatctcagagtgctgtggctgttacatctgtgcagccggctggggtgcaatcatctggtgctacatcgactgatgcggtaatcaatgctactaaccagcaatccttatctgattggcaagagcacacttctgctgatgggagaagatattattacaacaagaggacaaggcaatctagttgggagaaacctttagaattgatgtctcctatagagagagctgatgcatcaactgtttggaaggaattcacttcttccgaaggaagaaagtattattataacaaggttactcagcaatcaacatggtcaataccagaggaacttaagttggctcgtgagcaggcacagaatgctgcaaaccagggaatgcagtcagaaacaagtgatacatgcaatgctgtagtctcctccacagaaacaccaacaccaacagcagctaatgcagctagcttgaacacttccttgacatcaaatgggcttgcttccagcccgtcttctgtcacaccaattgcagcaactgattctcaacggttggtttctggattatctgggacctctgtttcccattctatggctaccccaagcaccacaggggtagaaccaagcactgtggtaactacgagtgctgcacctacaatagttgccggaagctctggactagctgagaattcacctcaacaacccaaaatgccacccgttgttgaaaatcaagcatctcaagattttgcttctgcaaatggatcttctcttcaagatatcgaggaagccaaaagaccattgcctgtggttggaaaaaataatgtgactccacctgaagagaaaaccaatgacgatgaaaccttggtatatgcaaataaactggaagcaaaaaatgcatttaaagcgcttttggaatctgtgagtgttcagtctgattggacatgggaacaggcaatgagagaaattatcaatgacaaaagatataatgcactaaaaactcttggtgagcgaaaacaggcttttaatgagtatttgggccaaaggaagaagctggaggctgaagagaggcgcatgaagcagaaaagagcccgtgaagaattcacaaagatgttggaggagtgcaaggaacttacatcatccatgaggtggagcaaagctattagtatgtttgaaaatgatgaacgattcaatgctgttgaaagaccaagggaccgagaagatttatttgaaagctacatggtggaacttgagaggaaggaaaaggaaaatgctgcagaggaacaccgccagaatatagcagaatatagaaaatttctggagtcctgtgactatgtgaaggtgaatagcccttggcgaaaaatccaagatcggttagaggatgatgatagatacttgcgacttgaaaaaattgaccgcttgctagttttccaggactatattcgggacttggagaaagaagaagaggaacaaaaaagaatacagaaggatcgaattcgtcggggtgaaaggaaaaaccgtgatgcatttcgcaagttgcttggagaacatgtttctgctggaattcttactgctaaaactcaatggcgagaatattgcttgaaggttagggatttacctcaatatcaagctgttgcgtcaaatacctctggttccactccaaaagatttgtttgaggatgttgctgaggatcttgaaaaacagtatcatgaagacaagacgctcataaaagatacagttaagtcaggcaagatcactgtagtgactacatcagtatttgaggagtttaaggtcgctgtcttggaaggagctgcatgccaaacaatatctgagatcaatttgaagcttatattcgaagagttgttagagagagctaaggagaaggaggagaaagaagccaagaagcgccaacgccttgctgatgactttactaacctgttatatacattcaaggatattacaacttcctcaaaatgggaggattgcaagtcactttttgaggagactcaagagtacaggtcaattggagacgaaagctatagtagagaaatttttgaggaatacatcacatacttgaaggaaaaagctaaagagaaggatcgcaagcgtgaagaggaaaaggctaaaaaggagaaagaaagagaagagaaacggaaggagaaggaaaaaaaagaaaaggatagagaacgtgaaaaagataagtctaaggaacgtaataagaaggatgaaacagatagtgataatcaagacatggctgacagccatggttacaaagaggagaagaaaaaagaaaaggataaagaaaggaaacatcggaaaaggcatcagagcagtatagatgatgtggattctgaaaaggaagagaaggaagaatctaaaaaatcacgaaggcatggcagtgaacgcaagaagtctcggaagcatgcaaactctcctgaatcagacaatgaaaaccggcatagaagacacaagagggaccactgggatggttccaggaaaactggggggcatgaggaacttgaagacggggagctcggggatgatgctgagaactagttgttctttcctaacctttttgcagttatgagataaagaacttcacctgcatcttttggagaatactgactttatttaagtacatttaattgttaattctctggcctctgggcacatctatgaattttgccctcaaatgtaaagaaatcttttggttctcgttatagttctgacaatttttatgaccgcttaattttataccaagagtgctgagtactgcaaatccaaatttaaactgtgtatcataaactttcgtttgtatgctcaatgtctgcagatgatttgtgaataaatgctgaatcattagagatcgtataaatatatttattctgacaacattattaccgg

SEQ ID NO: 853 - DNA, 3896 bp, Glycine max
ctatttctgccagtcaagtgtttttttcattagaaaaaaattgttttcggcggaataacaaaagaaaagaaaagaaaaacggattaggagaggaaaaaaaaaaaaagcttgtgcgagagaaatgttagaaccttgtttctgatttttttttcctcttcgattttgatttttttttctgttgtagtttttgttgttgttgctctctctattttcgaaacgagattggagctctgactttgtggtttttgaattttattttttggattgttttttccaaattgctgcatcgagcttgcaaatggaggtttggttcctgtcagtgaagctctgaaggatattggtatgtatggaaagttatacctagtgctgagacagaggctttgagggttctttgatgcaggaacaggttgtcgttccatttctttaaatttgctatgaaatttttgattttgagcttttcatttctgtcggggggctggagtttggaggtttgtgtttgcagaaattgatagttcaagtgcttgggatgtggagaatccatgattcacctggggaggatatcacgtttgtgtgttaattcctcacaatgttttttcagtgcggttgatataggctgatccgatgaacaataatgttgggaaaggggaaaaaggtttggcagaacaaaatcatatgttttttaacaaaaagagtctcaataatggagtagttaatgaaggggtaagctctggatcatcaactgaagatgacacaagatttaataaggtggctgaagatggaaacaatgggttgaggggcctgattcaaatccatgggagcttgcaaatttcacaacagcctcctcaagggccagtcgtatgctgggagagatttctccctgtaagatcaataaaagttttgctggtggaagatgatgattcgacacgccatgttgtgcgtgctctgttacggaattgtagttatgaagtcactgctgtttccaatggtcttcaagcgtggaaagtcctggaagatccagaaaatggcattgatcttgtcctaacagaggtagctatgcctattttgtctggaataggtcttttgtgcaagatcatgagccacaaaactctgaagaatattcctgtgattatgatgtcatctcatgattctatgggtatagtctttaagtgtttgtcaaaaggcgcagttgattttttagtgaaaccaattcggaggaatgaacttaaaaacctctggcagcacgtttggagaagatgccacagttctagtggtagtgggagtgaaagtgcgacccacaccagaaaatttgcaaagtcaagaagtaatgatgcatgtgaaaacaatagtgacagcagtgatgagaatgactatggaagcagagacttgagcgttcgagatggaagtggcactcagtctagtggtagtgggagtgaaagtgcgacccacaccagaaaatttgcaaagtcaagaagtaatgatgcatgtgaaaacattagtgacagcagtgatgagaatgactatggaagcagagacttgagcgttcgagatggaagtggcactcagagttcatggactaaatgtctagctcaagttggcagtcctcatccggtttcacctcataaacaattggttgatgcccctgatagcacttgtgcccaagtgatgcaaacaaagactgaaaaagttagtagtagatgggtgcatgcgacagaaaaagagtgccatgaacttattgatcctcttgatgatgttgcaatgggtaaggacttggccatgggaatatctttgaatatgcgactagagcatccactcaaggaactgtcctgcaatccaatgatgggtaaaggggcaaataagatgtctgatgtagatgatatgcagatcattaaaagacagagcaatgcctgtgaaaaaggacaactggaatacaatggtgataaaaccaggacacgggaaaatcaggctatgaatgttattgatgttactgatagcaacagtccactcgctgaaagcagagacttgaacactccaaatgggttttctggtttttcacaatcaaaagcaaactgttgccccaaagagcatccatcccttgaactaactttggaaaggctgggagaagtaagagatggtaaaaatttcacaggtgaagaatgcaatgtcttgagacattcagatcagtcagcattctcaaaatataatacagcttctgctaaccaggctcaaactggaaatgtaggaagctgttccccactagacaatagctcagctgcaccaaatacagagacaatgcacaactttgcatctcattcaaatggcactcctccaaatcaacaatctaatgggagcaacaacatcaatgacatggcctccattaatacatatcttggcaccaaacttgatacttttgacaagaagccagagtctggaagagggattggctcgtttaattctcgtgaactccaaactctgcagaagaataacatctgttcatctcagaagaaaactactgcccgggaagaatatacagaaatcattaaagaatcagtaggaggctctgaacatggattccaagtcgagcacacttactatcagcttcaccattataatcacattgcccataaagctgcagtagatctccaatcagatcatgatctcttactgaaaagctcaactcagcaatgtgtatcatcaaatgcatttggagggccagcagaaagtaatgctgcaaactatggtgtggatggaaatgcagcggagagtgatcatgggagcaataatggacaggatggaagcaacaccttgacaatcagaatgataaatatggaaatggcaatgtggctgctgggagcattggaattggtggcattgataggaaaagctttgggaatggggcagatgaaggacggcttgcattgagagaggctgccttgaccaaatttcgtctaaagagaaaagaaagatgctttgagaagaaggttcgatatcacagcaggaaaaaactagcagaacagcggccacgtattaggggacaatttgtcagacgaatagtgtctgaaggcaaagaagaaaaagataaacaaagtgacaacctggttcctggggataattctatcgacattcctcaatagcaccagacaaagtggtgatcattatttgactgattccgttccattaactgcctctagcttcttgctagcagaccagcttttcacacgttcacctaggaaggagcttggaggtttgtgttagaggaatctgtgattaggtagtttaattttatctctattgtgtgaaaatcagacatttaatttgaatcttccaagacaatgttctagattctgtttatggttgtctgaactttaaaactccaaatggacccatggaagtggttacctttggataggttaacctctgatgaaataaaatttatcatgttagcttgcattttggttacacctgcttaacagctaatgctgtttctttctgataattataacatgcttgctggatctagatccaatactggaatagatttcttgaattgattgtcgtgggtgaaaagaaagggagaatggagtttctctgcctcgcatgtttcataagtcataactatgaagcatgaacagttcaaggaatgaaccatgtctgtgttgtgcgagtatggaatgtgtcagctgtcaaccatgttcatgtctttgttcgacacgcaaggattgtgtcaaaaacaagtccatgtcatgtcattattttttcatcaattccttcgcccccaaaaagtaaggttgtgtttggtttagggtgagagaagtatgagagaaattttgtaatttttatgtgaaattcatatattttacactctattttaattcaaaagtttattttttattttcatc

SEQ ID NO: 854 - DNA, 2619 bp, Glycine max
atgtgcagttccaagattggttgggatgagaaggacatgaacacactgctacgcttcaaaacaggagtcacagatccttcaggtgtgctctcctcatggtttccaaaattagattgttgtcaatggactggagtcaagtgtgataacatcactggaagagttacacatcttaatctcccttgtcacacaactcaacctaaagttgttgctttggatgagaaggatgacaaatcacactgcctaactggtgaattcagcctaactttacttgaacttgaatttttgtggtacttggattttagcaacaatgacttcaagtctatccaatacaattcaatgggtagtcaaaaatgtgatcagttgtcaagaggtaaccttcctcatctttgtcggaactccaccaacctccgtttacttgatttatcattgaattatgatcttcttgtcgataatctccattggatttcccgtctttcctcattgcaatatcttagccttgaaggtgtccatcttcacaaggaaattgattggcttcaatcagtcaccatgctcccttcacttatagagttgcacttgcagaggtgtcaacttgaaaacatctatccatttcttcagtatgctaattttacctcacttcaagctctaaagctgtctggcaatgattttgaatctgagttgcctagttggttattcaatcttagttgtgacatctcttacattgaccttagccaaaataagatacatagccaactacctaaaacattgccaaatcttagaagagttaagttcttgactttatctcaaaattatctcaaaggacccattccaaattggttaggacaacttgaacaactacaaggacttgatctttctcataattttttttctggtccaatccctgcaagtttgggaaatttatcttctttgacaactttggtactcgattcaaatgagttgaatgaaaatcttccagacaatctctggcatctcttcaacttggaaagactttcaattttaaaaaattccttgactggaattgtgtctgaaagaaatttactttctttttcaaaattgagatggtttgccatgagttcccctggcctgatctttgattttgatcctgaatgggtccctccttttcaacttcaacatcttacattgggctatgtgagagacaaacttcctgcatggctattcacacagagttctctaaaatatctaatcattgaagattcaactgcttcatttgaacctcttgacaagttttggaactttgctactcaacttaaatttttcaatctggtaaacaacactatcaacggggacatatcaaatgtgttgctgagttcggaacatgtttggttagcttccaataatttaagaggtgggatgcctcgtatatcaccagatgtggttgctttaactttatataataattcattgtctggatccatttctcctctcttgtgtgacagcatgaaaaataaaagcaatttagtgcatctggacatgggttataaccatttaacgggagaactcacagattgttggaatgattggaaatcgttggttcatattgatttaggttacaacaacctaacaggcaagattcctcactcaatgggctccttgtctaatcttcgttttctgtatctggaaagcaacaagttctttggagaggtacctttttcactaaataactgcaagaatctttggatacttgatcttggtcacaataatctttctggagttataccaaactggttgggtcagagtgtgagaggtcttaaattgagatccaatcaattcagtggcaacattcccacacagctatgccaacttggttccttaatggtgatggattttgcaagcaatagattatcaggaccaatacctaattgcttacataacttcacagccatgctttttagtaatgcttcaacccttaaagtcggctttatagttcacttaccaggttttccattaatcataacatgtggtattacgatgcttataaaagggaacgagttagaatatatgaatttcatgaatgtgattgatctctcaaataacatcttgtctggaagtgtgcctctagagatatatatgctcactggactacagtccttgaatttgtcccataatcaattactgggaacaataccacaagagataggcaacttgaaacaattggaggccattgatctctcaagaaatcaattctcgggagaaattccagagtccatggctgtcttgcattatctttcggtcttgaatctgtcattaaacaattttgtgggggaaatcccaacagggacccaacttggttccacaaaccttagctatatcggcaatcctcacctctgtggagctccacttacaaagatatgcccacaagacgaaaagtccaacaacacaaaacatgcaggagaagaagatgatgatgataaatctgaactatactcctggttctatatgggcctgggaattggatttgccgtgggatttttgggagttttgggcgccattttcttcaaccggagatgcaggcatgcttattttcgatttctgcaccgaatgtatgactttgtgatccaaaagatgaactccatctattga

SEQ ID NO: 855 - DNA, 1027 bp, Glycine max
gacgccatctgcaccattaatttctttgtcctataaaaaaaattcacaaccaccatagttagaatattgtcctaattggggtagttagcacaagtccctaatcattcttataatgcccatggatttagactctacacttgcttcataattgggtggttgttgttgttgaaaagtattgtatgtgtggtgcacagggcagagattaatataaagccatggcatattttgttgggagggttgaaagaaggcactacgaggataccatggctgaacagagagccttatgcttactggaaaggtaatccagctgttgctgaaaccagacaagatctcatgaaatgcaatgtttatgaaaatcaagattggaatgctcgtttatttgcccagcattggtttcgagaatcacaagaggggttcaacaaatcagacttgccaagtcaatgcacttatagatataaggtgtacattgaaggttctgcttggtcagtcagtcaaaaatacattctgtcatgtgactctaccactctacgtgtacgactacatgtttcatctcctgaattcatatgctaaactcttcagatacaaaccctccataagtgctaatgctacagaactatgtgtggagtcaatggtttgtggagcagaaggatcagtaaagaaatttatggtggaatcattggtcaaggttcctgcaaataccgacccttgcaccatgcctgccccttttgaccctccaactttgtatgcaacattacagagaaaggaaagctcaattcaacaagttgaatcatgggagaaaagttattgggataatcaaaccataacatcttaatgaatatttgtttttccatattcaacttaactcattcattcttagaatatcttgggaggatacaagtagaatctagattatcttgtacttggctaaagaaaccatatcatgcttgacgaattatcagttttagactttacgaggaaaaaaaaattagtttgttaattttgtaaatatggataccaaaatgtaaaa
